(19) United States
(12) Patent Application Publication
(10) Pub. No.: US 2024/0424138 A1
(43) Pub. Date: Dec. 26, 2024

(54) GENOME EDITING COMPOSITIONS AND METHOD FOR TREATMENT OF RETINITIS PIGMENTOSA

(71) Applicant: Prime Medicine, Inc., Cambridge, MA (US)

(72) Inventor: Wei Hsi Yeh, Cambridge, MA (US)

(21) Appl. No.: 18/702,706

(22) PCT Filed: Oct. 21, 2022
(86) PCT No.: PCT/US2022/078552

§ 371 Date: Apr. 18, 2024

Related U.S. Application Data
(60) Provisional application No. 63/270,308, filed on Oct. 21, 2021.

(51) Int. Cl. A61K 48/00; A61P 27/02; C12N 9/12; C12N 9/22; C12N 15/11; C12N 15/86

(52) U.S. Cl. CPC A61K 48/005; A61P 27/02; C12N 9/1276; C12N 9/22; C12N 15/11; C12N 15/86; C12N 2310/20; C12N 2750/14143

(57) ABSTRACT

Provided herein are compositions and methods of using prime editing systems comprising prime editors and prime editing guide RNAs for treatment of genetic disorders.

### CROSS-REFERENCE

[0001] This application claims the benefit of U.S. Provisional Application No. 63/270,308, filed Oct. 21, 2021, which is incorporated herein by reference in its entirety.

### BACKGROUND

[0002] Retinal degeneration diseases, such as retinitis pigmentosa, may be caused in humans by disruption to the RHO gene (OMIM #180380), which is mainly expressed in photoreceptor cells of the retina and related tissues and encodes the rhodopsin protein (wild-type sequence given in NCBI ref NP_000530, SEQ ID NO: 1933. RHO is located in the human genome at 3q22.1 and contains 5 exons and spans about 5.0 kb. RHO mRNA is approximately 2.7 kb (NCBI ref. NM_000539, SEQ ID NO: 1934. A frequent disease-causing mutation of RHO is P23H, in which a C-to-A transversion at position 173 of the mRNA (position 68 of the coding sequence and in exon 1) causes a missense mutation in codon 23 from proline (CCC) to histidine (CAC). Retinitis pigmentosa is characterized by progressive destruction of photoreceptors, especially of rods, resulting in night blindness, loss of peripheral vision, and in some cases cone destruction may cause loss of color discrimination and general visual acuity.

### SUMMARY

[0003] In one aspect, provided herein is a prime editing guide RNA (PEgRNA) or a nucleic acid encoding the PEgRNA, wherein the PEgRNA comprises: a) a spacer that is complementary to a search target sequence on a first strand of a RHO gene wherein the spacer comprises at its 3′ end SEQ ID NO: 1; b) a gRNA core capable of binding to a Cas9 protein; and c) an extension arm comprising: (i) an editing template that comprises a region of complementarity to an editing target sequence on a second strand of the RHO gene, and (ii) a primer binding site (PBS) that comprises at its 5′ end a sequence that is a reverse complement of nucleotides 10-14 of SEQ ID NO: 1, wherein the first strand and second strand are complementary to each other, wherein the editing target sequence on the second strand comprises or is complementary to a portion of the RHO gene comprising a c.68 C→A substitution, and wherein the editing template encodes or comprises a wild type amino acid sequence of a Rhodopsin protein at the c.68 C→A substitution site. In some embodiments, the spacer is from 17-22 nucleotides in length. In some embodiments, the spacer comprises at its 3′ end any one of SEQ ID NOs: 2-6. In some embodiments, the spacer comprises at its 3′ end SEQ ID NO: 4. In some embodiments, the editing template comprises SEQ ID NO: 22 at its 3′ end. In some embodiments, the editing template comprises at its 3′ end SEQ ID NO: 24, 26, 28, 30, 32, 34, 36, 38, 40, 42, 44, 46, 48, 50, 52, 54, 56, 58, 60, 62, 64, 66, 68, or 70. In some embodiments, the editing template comprises SEQ ID NO: 23 at its 3′ end and encodes a GGG-to-GGA PAM silencing edit. In some embodiments, the editing template comprises at its 3′ end SEQ ID NO: 25, 27, 29, 31, 33, 35, 37, 39, 41, 43, 45, 47, 49, 51, 53, 55, 57, 59, 61, 63, 65, 67, 69, or 71. In some embodiments, the editing template has a length of 40 nucleotides or less. In some embodiments, the editing template has a length of 26 nucleotides or less. In some embodiments, the editing template is 20 to 26 nucleotides in length. In some embodiments, the editing template is 20 to 22 nucleotides in length. In some embodiments, the PBS comprises at its 5′ end a sequence corresponding to sequence number 7. In some embodiments, the PBS comprises sequence number 7, 8, 9, 10, 11, 12, 13, 14, 15, 16, 17, 18, 19, 20, or 21. In some embodiments, the PBS has a length of 15 nucleotides or less. In some embodiments, the PBS is 8 to 15 nucleotides in length. In some embodiments, the PBS is 11 to 15 nucleotides in length. In some embodiments, the PEgRNA comprises a sequence selected from any one of SEQ ID NOs: 83-493. In some embodiments, the PEgRNA comprises from 5′ to 3′, the spacer, the gRNA core, the RTT, and the PBS. In some embodiments, the spacer, the gRNA core, the RTT, and the PBS form a contiguous sequence in a single molecule. In some embodiments, the PEgRNA further comprises 3′ mN*mN*mN*N and 5′ mN*mN*mN* modifications, where m indicates that the nucleotide contains a 2′-O-Me modification and a * indicates the presence of a phosphorothioate bond. In some embodiments, the PEgRNA further comprises 3′ mT*mT*mT*T and 5′ mN*mN*mN* modifications, where m indicates that the nucleotide contains a 2′-O-Me modification, a * indicates the presence of a phosphorothioate bond, and a T indicates the presence of an additional uridine nucleotide.

[0004] In one aspect, provided herein is a prime editing guide RNA (PEgRNA), or a nucleic acid encoding the PEgRNA, wherein the PEgRNA comprises: a) a spacer comprising at its 3′ end SEQ ID NO: 1; b) a gRNA core capable of binding to a Cas9 protein; and c) an extension arm comprising: (i) an editing template comprising at its 3′ end any one of SEQ ID NOs: 22-23, and (ii) a primer binding site (PBS) comprising at its 5′ end a sequence that is a reverse complement of nucleotides 10-14 of SEQ ID NO: 1. In some embodiments, the spacer is from 17-22 nucleotides in length. In some embodiments, the spacer comprises at its 3′ end any one of SEQ ID NOs: 2-6. In some embodiments, the spacer comprises at its 3′ end SEQ ID NO: 4. In some embodiments, the editing template comprises SEQ ID NO: 22 at its 3′ end. In some embodiments, the editing template comprises at its 3′ end SEQ ID NO: 24, 26, 28, 30, 32, 34, 36, 38, 40, 42, 44, 46, 48, 50, 52, 54, 56, 58, 60, 62, 64, 66, 68, or 70. In some embodiments, the editing template comprises SEQ ID NO: 23 at its 3′ end and encodes a GGG-to-GGA PAM silencing edit. In some embodiments, the editing template comprises at its 3′ end SEQ ID NO: 25, 27, 29, 31, 33, 35, 37, 39, 41, 43, 45, 47, 49, 51, 53, 55, 57, 59, 61, 63, 65, 67, 69, or 71. In some embodiments, the editing template has a length of 40 nucleotides or less. In some embodiments, the editing template has a length of 26 nucleotides or less. In some embodiments, the editing template is 20 to 26 nucleotides in length. In some embodiments, the editing template is 20 to 22 nucleotides in length. In some embodiments, the PBS comprises at its 5′ end a sequence corresponding to sequence number 7. In some embodiments, the PBS comprises sequence number 7, 8, 9, 10, 11, 12, 13, 14, 15, 16, 17, 18, 19, 20, or 21. In some embodiments, the PBS has a length of 15 nucleotides or less. In some embodiments, the PBS is 8 to 15 nucleotides in length. In some embodiments, the PBS is 11 to 15 nucleotides in length. In some embodiments, the PEgRNA comprises a sequence selected from any one of SEQ ID NOs: 83-493. In some embodiments, the PEgRNA comprises from 5′ to 3′, the spacer, the gRNA core, the RTT, and the PBS. In some embodiments, the spacer, the gRNA core, the RTT, and the PBS form a contiguous sequence in a single molecule. In some embodiments, the PEgRNA further comprises 3′ mN*mN*mN*N and 5′ mN*mN*mN* modifications, where m indicates that the nucleotide contains a 2′-O-Me modification and a * indicates the presence of a phosphorothioate bond. In some embodiments, the PEgRNA further comprises 3′ mT*mT*mT*T and 5′ mN*mN*mN* modifications, where m indicates that the nucleotide contains a 2′-O-Me modification, a * indicates the presence of a phosphorothioate bond, and a T indicates the presence of an additional uridine nucleotide.

[0005] In one aspect, provided herein is a prime editing system comprising: (a) the PEgRNA or the nucleic acid encoding the PEgRNA of the disclosure or any of the aspects herein, and (b) a ngRNA, or a nucleic acid encoding the ngRNA, wherein the ngRNA comprises: (i) a spacer comprising at its 3′ end a sequence corresponding to nucleotides 4-20 of SEQ ID NO: 72, 73, 74, 75, 76, 77, 78, 79, 80, 81, or 82; and (ii) an ngRNA core capable of binding a Cas9 protein. In some embodiments, the spacer of the ngRNA comprises at its 3′ end SEQ ID NO: 72, 73, 74, 75, 76, 77, 78, 79, 80, 81, or 82. In some embodiments, the prime editing system further comprises: (c) a prime editor comprising a Cas9 nickase having a nuclease inactivating mutation in the HNH domain, or a nucleic acid encoding the Cas9 nickase, and a reverse transcriptase, or a nucleic acid encoding the reverse transcriptase. In some embodiments, the prime editor is a fusion protein. In some embodiments, the prime editing system further comprises: (c) an N-terminal extein comprising an N-terminal fragment of a prime editor fusion protein and an N-intein or a polynucleotide encoding the N-terminal extein; and (d) a C-terminal extein comprising a C-terminal fragment of the prime editor fusion protein and a C-intein, or a polynucleotide encoding the C-terminal extein; wherein the N-intein and the C-intein of the N-terminal and C-terminal exteins are capable of self-excision to join the N-terminal fragment and the C-terminal fragment to form the prime editor fusion protein, and wherein the prime editor fusion protein comprises a Cas9 nickase and a reverse transcriptase (RT) domain. In some embodiments, the Cas9 nickase comprises an amino acid sequence having at least 80%, 85%, 90%, 95%, 96%, 97%, 98%, 99%, or 100% identity to SEQ ID NO: 1867 or SEQ ID NO: 1868. In some embodiments, the reverse transcriptase comprises an amino acid sequence having at least 80%, 85%, 90%, 95%, 96%, 97%, 98%, 99%, or 100% identity to SEQ ID NO: 1864. In some embodiments, the sequence identities are determined by Needleman-Wunsch alignment of two protein sequences with Gap Costs set to Existence: 11 Extension: 1 where percent identity is calculated by dividing the number of identities by the length of the alignment.

[0006] In one aspect, provided herein is a prime editing guide RNA (PEgRNA) or a nucleic acid encoding the PEgRNA, wherein the PEgRNA comprises: a) a spacer that is complementary to a search target sequence on a first strand of a RHO gene wherein the spacer comprises at its 3′ end SEQ ID NO: 729; b) a gRNA core capable of binding to a Cas9 protein; and c) an extension arm comprising: (i) an editing template that comprises a region of complementarity to an editing target sequence on a second strand of the RHO gene, and (ii) a primer binding site (PBS) that comprises at its 5′ end a sequence that is a reverse complement of nucleotides 10-14 of SEQ ID NO: 729, wherein the first strand and second strand are complementary to each other, wherein the editing target sequence on the second strand comprises or is complementary to a portion of the RHO gene comprising a c.68 C→A substitution, and wherein the editing template encodes or comprises a wild type amino acid sequence of a Rhodopsin protein at the c.68 C→A substitution site. In some embodiments, the spacer is from 17-22 nucleotides in length. In some embodiments, the spacer comprises at its 3′ end any one of SEQ ID NOs: 730, 731, 76, 732, or 733. In some embodiments, the spacer comprises at its 3′ end SEQ ID NO: 76. In some embodiments, the editing template comprises SEQ ID NO: 750 at its 3′ end. In some embodiments, the editing template comprises at its 3′ end SEQ ID NO: 754, 758, 762, 766, 770, 774, 778, 782, 786, 790, 794, 798, 802, 806, 810, 814, 818, 822, 826, 830, 834, 838, 842, or 846. In some embodiments, the editing template comprises SEQ ID NO: 749 at its 3′ end and encodes a TGG-to-TTG PAM silencing edit. In some embodiments, the editing template comprises at its 3′ end SEQ ID NO: 753, 757, 761, 765, 769, 773, 777, 781, 785, 789, 793, 797, 801, 805, 809, 813, 817, 821, 825, 829, 833, 837, 841, or 845. In some embodiments, the editing template comprises SEQ ID NO: 751 at its 3′ end and encodes a TGG-to-TCG PAM silencing edit. In some embodiments, the editing template comprises at its 3′ end SEQ ID NO: 755, 759, 763, 767, 771, 775, 779, 783, 787, 791, 795, 799, 803, 807, 811, 815, 819, 823, 827, 831, 835, 839, 843, or 847. In some embodiments, the editing template comprises SEQ ID NO: 752 at its 3′ end and encodes a TGG-to-TAG PAM silencing edit. In some embodiments, the editing template comprises at its 3′ end SEQ ID NO: 756, 760, 764, 768, 772, 776, 780, 784, 788, 792, 796, 800, 804, 808, 812, 816, 820, 824, 828, 832, 836, 840, 844 or 848. In some embodiments, the editing template has a length of 40 nucleotides or less. In some embodiments, the editing template has a length of 26 nucleotides or less. In some embodiments, the editing template is 20 to 26 nucleotides in length. In some embodiments, the editing template is 20 to 22 nucleotides in length. In some embodiments, the PBS comprises at its 5′ end a sequence corresponding to sequence number 734. In some embodiments, the PBS comprises sequence number 735, 736, 737, 738, 739, 740, 741, 742, 743, 744, 745, 746, 747, or 748. In some embodiments, the PBS has a length of 16 nucleotides or less. In some embodiments, the PBS is 8 to 16 nucleotides in length. In some embodiments, the PEgRNA comprises a sequence selected from any one of SEQ ID NOs: 863-1156. In some embodiments, the PEgRNA comprises from 5′ to 3′, the spacer, the gRNA core, the RTT, and the PBS. In some embodiments, the spacer, the gRNA core, the RTT, and the PBS form a contiguous sequence in a single molecule. In some embodiments, the PEgRNA further comprises 3′ mN*mN*mN*N and 5′ mN*mN*mN* modifications, where m indicates that the nucleotide contains a 2′-O-Me modification and a * indicates the presence of a phosphorothioate bond. In some embodiments, the PEgRNA further comprises 3′ mT*mT*mT*T and 5′ mN*mN*mN* modifications, where m indicates that the nucleotide contains a 2′-O-Me modification, a * indicates the presence of a phosphorothioate bond, and a T indicates the presence of an additional uridine nucleotide.

[0007] In one aspect, provided herein is a prime editing guide RNA (PEgRNA), or a nucleic acid encoding the PEgRNA, wherein the PEgRNA comprises: a) a spacer comprising at its 3′ end SEQ ID NO: 729; b) a gRNA core capable of binding to a Cas9 protein, and c) an extension arm comprising: i) an editing template comprising at its 3′ end any one of SEQ ID NOs: 749-752, and ii) a primer binding site (PBS) comprising at its 5′ end a sequence that is a reverse complement of nucleotides 10-14 of SEQ ID NO: 729. In some embodiments, the spacer is from 17-22 nucleotides in length. In some embodiments, the spacer comprises at its 3′ end any one of SEQ ID NOs: 730, 731, 76, 732, or 733. In some embodiments, the spacer comprises at its 3′ end SEQ ID NO: 76. In some embodiments, the editing template comprises SEQ ID NO: 750 at its 3′ end. In some embodiments, the editing template comprises at its 3′ end SEQ ID NO: 754, 758, 762, 766, 770, 774, 778, 782, 786, 790, 794, 798, 802, 806, 810, 814, 818, 822, 826, 830, 834, 838, 842, or 846. In some embodiments, the editing template comprises SEQ ID NO: 749 at its 3′ end and encodes a TGG-to-TTG PAM silencing edit. In some embodiments, the editing template comprises at its 3′ end SEQ ID NO: 753, 757, 761, 765, 769, 773, 777, 781, 785, 789, 793, 797, 801, 805, 809, 813, 817, 821, 825, 829, 833, 837, 841, or 845. In some embodiments, the editing template comprises SEQ ID NO: 751 at its 3′ end and encodes a TGG-to-TCG PAM silencing edit. In some embodiments, the editing template comprises at its 3′ end SEQ ID NO: 755, 759, 763, 767, 771, 775, 779, 783, 787, 791, 795, 799, 803, 807, 811, 815, 819, 823, 827, 831, 835, 839, 843, or 847. In some embodiments, the editing template comprises SEQ ID NO: 752 at its 3′ end and encodes a TGG-to-TAG PAM silencing edit. In some embodiments, the editing template comprises at its 3′ end SEQ ID NO: 756, 760, 764, 768, 772, 776, 780, 784, 788, 792, 796, 800, 804, 808, 812, 816, 820, 824, 828, 832, 836, 840, 844 or 848. In some embodiments, the editing template has a length of 40 nucleotides or less. In some embodiments, the editing template has a length of 26 nucleotides or less. In some embodiments, the editing template is 20 to 26 nucleotides in length. In some embodiments, the editing template is 20 to 22 nucleotides in length. In some embodiments, the PBS comprises at its 5′ end a sequence corresponding to sequence number 734. In some embodiments, the PBS comprises sequence number 735, 736, 737, 738, 739, 740, 741, 742, 743, 744, 745, 746, 747, or 748. In some embodiments, the PBS has a length of 16 nucleotides or less. In some embodiments, the PBS is 8 to 16 nucleotides in length. In some embodiments, the PEgRNA comprises a sequence selected from any one of SEQ ID NOs: 863-1156. In some embodiments, the PEgRNA comprises from 5′ to 3′, the spacer, the gRNA core, the RTT, and the PBS. In some embodiments, the spacer, the gRNA core, the RTT, and the PBS form a contiguous sequence in a single molecule. In some embodiments, the PEgRNA further comprises 3′ mN*mN*mN*N and 5′ mN*mN*mN* modifications, where m indicates that the nucleotide contains a 2′-O-Me modification and a * indicates the presence of a phosphorothioate bond. In some embodiments, the PEgRNA further comprises 3′ mT*mT*mT*T and 5′ mN*mN*mN* modifications, where m indicates that the nucleotide contains a 2′-O-Me modification, a * indicates the presence of a phosphorothioate bond, and a T indicates the presence of an additional uridine nucleotide.

[0008] In one aspect, provided herein is a prime editing system comprising: (a) the PEgRNA or the nucleic acid encoding the PEgRNA of the disclosure or any one of the aspects herein, and (b) a ngRNA, or a nucleic acid encoding the ngRNA, wherein the ngRNA comprises: (i) a spacer comprising at its 3′ end a sequence corresponding to nucleotides 4-20 of SEQ ID NO: 849, 850, 851, 520, 852, 853, 854, 4, 855, 856, 857, 858, 859, 860, 861, or 862; and (ii) an ngRNA core capable of binding a Cas9 protein. In some embodiments, the spacer of the ngRNA comprises at its 3′ end SEQ ID NO: 849, 850, 851, 520, 852, 853, 854, 4, 855, 856, 857, 858, 859, 860, 861, or 862. In some embodiments, the prime editing system further comprises: (c) a prime editor comprising a Cas9 nickase having a nuclease inactivating mutation in the HNH domain, or a nucleic acid encoding the Cas9 nickase, and a reverse transcriptase, or a nucleic acid encoding the reverse transcriptase. In some embodiments, the prime editor is a fusion protein. In some embodiments, the prime editing system further comprises: (c) an N-terminal extein comprising an N-terminal fragment of a prime editor fusion protein and an N-intein or a polynucleotide encoding the N-terminal extein; and (d) a C-terminal extein comprising a C-terminal fragment of the prime editor fusion protein and a C-intein, or a polynucleotide encoding the C-terminal extein; wherein the N-intein and the C-intein of the N-terminal and C-terminal exteins are capable of self-excision to join the N-terminal fragment and the C-terminal fragment to form the prime editor fusion protein, and wherein the prime editor fusion protein comprises a Cas9 nickase and a reverse transcriptase (RT) domain. In some embodiments, the Cas9 nickase comprises an amino acid sequence having at least 80%, 85%, 90%, 95%, 96%, 97%, 98%, 99%, or 100% identity to SEQ ID NO: 1867 or SEQ ID NO: 1868. In some embodiments, the reverse transcriptase comprises an amino acid sequence having at least 80%, 85%, 90%, 95%, 96%, 97%, 98%, 99%, or 100% identity to SEQ ID NO: 1864. In some embodiments, the sequence identities are determined by Needleman-Wunsch alignment of two protein sequences with Gap Costs set to Existence: 11 Extension: 1 where percent identity is calculated by dividing the number of identities by the length of the alignment.

[0009] In one aspect, provided herein is a prime editing guide RNA (PEgRNA) or a nucleic acid encoding the PEgRNA, wherein the PEgRNA comprises: a) a spacer that is complementary to a search target sequence on a first strand of a RHO gene wherein the spacer comprises at its 3′ end SEQ ID NO: 517; b) a gRNA core capable of binding to a Cas9 protein; c) an extension arm comprising: i) an editing template that comprises a region of complementarity to an editing target sequence on a second strand of the RHO gene, and ii) a primer binding site (PBS) that comprises at its 5′ end a sequence that is a reverse complement of nucleotides 10-14 of SEQ ID NO: 517, wherein the first strand and second strand are complementary to each other, wherein the editing target sequence on the second strand comprises or is complementary to a portion of the RHO gene comprising a c.68 C→A substitution, and wherein the editing template encodes or comprises a wild type amino acid sequence of a Rhodopsin protein at the c.68 C→A substitution site. In some embodiments, the spacer is from 17-22 nucleotides in length. In some embodiments, the spacer comprises at its 3′ end any one of SEQ ID NOs: 518-522. In some embodiments, the spacer comprises at its 3′ end SEQ ID NO: 520. In some embodiments, the editing template comprises SEQ ID NO: 538 at its 3′ end. In some embodiments, the editing template comprises at its 3′ end SEQ ID NO: 543, 548, 553, 558, 563, 568, 573, 578, 583, 588, 593, 598, 603, 608, 613, 618, 623, 628, 633, 638, 643, 648, 653, 658, 663, 668, 673, 678, 683, or 688. In some embodiments, the editing template comprises SEQ ID NO: 541 at its 3′ end and encodes a TGG-to-GGC PAM silencing edit. In some embodiments, the editing template comprises at its 3′ end SEQ ID NO: 546, 551, 556, 561, 566, 571, 576, 581, 586, 591, 596, 601, 606, 611, 616, 621, 626, 631, 636, 641, 646, 651, 656, 661, 666, 671, 676, 681, 686, or 691. In some embodiments, the editing template comprises SEQ ID NO: 540 at its 3′ end and encodes a TGG-to-GGT PAM silencing edit. In some embodiments, the editing template comprises at its 3′ end SEQ ID NO: 545, 550, 555, 560, 565, 570, 575, 580, 585, 590, 595, 600, 605, 610, 615, 620, 625, 630, 635, 640, 645, 650, 655, 660, 665, 670, 675, 680, 685, or 690. In some embodiments, the editing template comprises SEQ ID NO: 542 at its 3′ end and encodes a TGG-to-GGA PAM silencing edit. In some embodiments, the editing template comprises at its 3′ end SEQ ID NO: 547, 552, 557, 562, 567, 572, 577, 582, 587, 592, 597, 602, 607, 612, 617, 622, 627, 632, 637, 642, 647, 652, 657, 662, 667, 672, 677, 682, 687, or 692. In some embodiments, the editing template comprises SEQ ID NO: 539 at its 3′ end and encodes a TGG-to-GGA PAM silencing edit. In some embodiments, the editing template comprises at its 3′ end SEQ ID NO: 544, 549, 554, 559, 564, 569, 574, 579, 584, 589, 594, 599, 604, 609, 614, 619, 624, 629, 634, 639, 644, 649, 654, 659, 664, 669, 674, 679, 684, or 689. In some embodiments, the editing template has a length of 40 nucleotides or less. In some embodiments, the editing template has a length of 16 nucleotides or less. In some embodiments, the editing template is 10 to 16 nucleotides in length. In some embodiments, the PBS comprises at its 5′ end a sequence corresponding to sequence number 523. In some embodiments, the PBS comprises sequence number 523, 524, 525, 526, 527, 528, 529, 530, 531, 532, 533, 534, 535, 536, or 537. In some embodiments, the PBS has a length of 14 nucleotides or less. In some embodiments, the PBS is 8 to 14 nucleotides in length. In some embodiments, the PEgRNA comprises a sequence selected from any one of SEQ ID NOs: 697-728. In some embodiments, the PEgRNA comprises from 5′ to 3′, the spacer, the gRNA core, the RTT, and the PBS. In some embodiments, the spacer, the gRNA core, the RTT, and the PBS form a contiguous sequence in a single molecule. In some embodiments, the PEgRNA further comprises 3′ mN*mN*mN*N and 5′ mN*mN*mN* modifications, where m indicates that the nucleotide contains a 2′-O-Me modification and a * indicates the presence of a phosphorothioate bond. In some embodiments, the PEgRNA further comprises 3′ mT*mT*mT*T and 5′ mN*mN*mN* modifications, where m indicates that the nucleotide contains a 2′-O-Me modification, a * indicates the presence of a phosphorothioate bond, and a T indicates the presence of an additional uridine nucleotide.

[0010] In one aspect, provided herein is a prime editing guide RNA (PEgRNA), or a nucleic acid encoding the PEgRNA, wherein the PEgRNA comprises: a) a spacer comprising at its 3′ end SEQ ID NO: 517; b) a gRNA core capable of binding to a Cas9 protein; and c) an extension arm comprising: i) an editing template comprising at its 3′ end any one of SEQ ID NOs: 538, 539, 540, 541, or 542, and ii) a primer binding site (PBS) comprising at its 5′ end a sequence that is a reverse complement of nucleotides 10-14 of SEQ ID NO: 517. In some embodiments, the spacer is from 17-22 nucleotides in length. In some embodiments, the spacer comprises at its 3′ end any one of SEQ ID NOs: 518-522. In some embodiments, the spacer comprises at its 3′ end SEQ ID NO: 520. In some embodiments, the editing template comprises SEQ ID NO: 538 at its 3′ end. In some embodiments, the editing template comprises at its 3′ end SEQ ID NO: 543, 548, 553, 558, 563, 568, 573, 578, 583, 588, 593, 598, 603, 608, 613, 618, 623, 628, 633, 638, 643, 648, 653, 658, 663, 668, 673, 678, 683, or 688. In some embodiments, the editing template comprises SEQ ID NO: 541 at its 3′ end and encodes a TGG-to-GGC PAM silencing edit. In some embodiments, the editing template comprises at its 3′ end SEQ ID NO: 546, 551, 556, 561, 566, 571, 576, 581, 586, 591, 596, 601, 606, 611, 616, 621, 626, 631, 636, 641, 646, 651, 656, 661, 666, 671, 676, 681, 686, or 691. In some embodiments, the editing template comprises SEQ ID NO: 540 at its 3′ end and encodes a TGG-to-GGT PAM silencing edit. In some embodiments, the editing template comprises at its 3′ end SEQ ID NO: 545, 550, 555, 560, 565, 570, 575, 580, 585, 590, 595, 600, 605, 610, 615, 620, 625, 630, 635, 640, 645, 650, 655, 660, 665, 670, 675, 680, 685, or 690. In some embodiments, the editing template comprises SEQ ID NO: 542 at its 3′ end and encodes a TGG-to-GGA PAM silencing edit. In some embodiments, the editing template comprises at its 3′ end SEQ ID NO: 547, 552, 557, 562, 567, 572, 577, 582, 587, 592, 597, 602, 607, 612, 617, 622, 627, 632, 637, 642, 647, 652, 657, 662, 667, 672, 677, 682, 687, or 692. In some embodiments, the editing template comprises SEQ ID NO: 539 at its 3′ end and encodes a TGG-to-GGA PAM silencing edit. In some embodiments, the editing template comprises at its 3′ end SEQ ID NO: 544, 549, 554, 559, 564, 569, 574, 579, 584, 589, 594, 599, 604, 609, 614, 619, 624, 629, 634, 639, 644, 649, 654, 659, 664, 669, 674, 679, 684, or 689. In some embodiments, the editing template has a length of 40 nucleotides or less. In some embodiments, the editing template has a length of 16 nucleotides or less. In some embodiments, the editing template is 10 to 16 nucleotides in length. In some embodiments, the PBS comprises at its 5′ end a sequence corresponding to sequence number 523. In some embodiments, the PBS comprises sequence number 523, 524, 525, 526, 527, 528, 529, 530, 531, 532, 533, 534, 535, 536, or 537. In some embodiments, the PBS has a length of 14 nucleotides or less. In some embodiments, the PBS is 8 to 14 nucleotides in length. In some embodiments, the PEgRNA comprises a sequence selected from any one of SEQ ID NOs: 697-728. In some embodiments, the PEgRNA comprises from 5′ to 3′, the spacer, the gRNA core, the RTT, and the PBS. In some embodiments, the spacer, the gRNA core, the RTT, and the PBS form a contiguous sequence in a single molecule. In some embodiments, the PEgRNA further comprises 3′ mN*mN*mN*N and 5′ mN*mN*mN* modifications, where m indicates that the nucleotide contains a 2′-O-Me modification and a * indicates the presence of a phosphorothioate bond. In some embodiments, the PEgRNA further comprises 3′ mT*mT*mT*T and 5′ mN*mN*mN* modifications, where m indicates that the nucleotide contains a 2′-O-Me modification, a * indicates the presence of a phosphorothioate bond, and a T indicates the presence of an additional uridine nucleotide.

[0011] In one aspect, provided herein is a prime editing system comprising: (a) the PEgRNA or the nucleic acid encoding the PEgRNA of the disclosure or any one of the aspects herein, and (b) a ngRNA, or a nucleic acid encoding the ngRNA, wherein the ngRNA comprises: (i) a spacer comprising at its 3′ end a sequence corresponding to nucleotides 4-20 of SEQ ID NO: 72, 73, 74, 693, 694, 75, 76, 77, 695, 78, 696, 79, or 80; and (ii) an ngRNA core capable of binding a Cas9 protein. In some embodiments, the spacer of the ngRNA comprises at its 3′ end SEQ ID NO: 72, 73, 74, 693, 694, 75, 76, 77, 695, 78, 696, 79, or 80. In some embodiments, the prime editing system further comprises: (c) a prime editor comprising a Cas9 nickase having a nuclease inactivating mutation in the HNH domain, or a nucleic acid encoding the Cas9 nickase, and a reverse transcriptase, or a nucleic acid encoding the reverse transcriptase. In some embodiments, the prime editor is a fusion protein. In some embodiments, the prime editing system further comprises: (c) an N-terminal extein comprising an N-terminal fragment of a prime editor fusion protein and an N-intein or a polynucleotide encoding the N-terminal extein; and (d) a C-terminal extein comprising a C-terminal fragment of the prime editor fusion protein and a C-intein, or a polynucleotide encoding the C-terminal extein; wherein the N-intein and the C-intein of the N-terminal and C-terminal exteins are capable of self-excision to join the N-terminal fragment and the C-terminal fragment to form the prime editor fusion protein, and wherein the prime editor fusion protein comprises a Cas9 nickase and a reverse transcriptase (RT) domain. In some embodiments, the Cas9 nickase comprises an amino acid sequence having at least 80%, 85%, 90%, 95%, 96%, 97%, 98%, 99%, or 100% identity to SEQ ID NO: 1867 or SEQ ID NO: 1868. In some embodiments, the reverse transcriptase comprises an amino acid sequence having at least 80%, 85%, 90%, 95%, 96%, 97%, 98%, 99%, or 100% identity to SEQ ID NO: 1864. In some embodiments, the sequence identities are determined by Needleman-Wunsch alignment of two protein sequences with Gap Costs set to Existence: 11 Extension: 1 where percent identity is calculated by dividing the number of identities by the length of the alignment.

[0012] In one aspect, provided herein is a prime editing guide RNA (PEgRNA) or a nucleic acid encoding the PEgRNA, wherein the PEgRNA comprises: a) a spacer that is complementary to a search target sequence on a first strand of a RHO gene wherein the spacer comprises at its 3′ end SEQ ID NO: 1187; b) a gRNA core capable of binding to a Cas9 protein; and c) an extension arm comprising: i) an editing template that comprises a region of complementarity to an editing target sequence on a second strand of the RHO gene, and ii) a primer binding site that comprises at its 5′ end a sequence that is a reverse complement of nucleotides 10-14 of SEQ ID NO: 1187, wherein the first strand and second strand are complementary to each other, wherein the editing target sequence on the second strand comprises or is complementary to a portion of the RHO gene comprising a c.68 C→A substitution, and wherein the editing template encodes or comprises a wild type amino acid sequence of a Rhodopsin protein at the c.68 C→A substitution site. In some embodiments, the spacer is from 17-22 nucleotides in length. In some embodiments, the spacer comprises at its 3′ end any one of SEQ ID NOs: 1188, 1189, 75, 1190, or 1191. In some embodiments, the spacer comprises at its 3′ end SEQ ID NO: 75. In some embodiments, the editing template comprises SEQ ID NO: 1208 at its 3′ end. In some embodiments, the editing template comprises at its 3′ end SEQ ID NO: 1212, 1216, 1220, 1224, 1228, 1232, 1236, 1240, 1244, 1248, 1252, 1256, 1260, 1264, 1268, 1272, 1276, or 1280. In some embodiments, the editing template comprises SEQ ID NO: 1207 at its 3′ end and encodes a CGG-to-CTG PAM silencing edit. In some embodiments, the editing template comprises at its 3′ end SEQ ID NO: 1211, 1215, 1219, 1223, 1227, 1231, 1235, 1239, 1243, 1247, 1251, 1255, 1259, 1263, 1267, 1271, 1275, or 1279. In some embodiments, the editing template comprises SEQ ID NO: 1209 at its 3′ end and encodes a CGG-to-CCG PAM silencing edit. In some embodiments, the editing template comprises at its 3′ end SEQ ID NO: 1213, 1217, 1221, 1225, 1229, 1233, 1237, 1241, 1245, 1249, 1253, 1257, 1261, 1265, 1269, 1273, 1277 or 1281. In some embodiments, the editing template comprises SEQ ID NO: 1210 at its 3′ end and encodes a CGG-to-CAG PAM silencing edit. In some embodiments, the editing template comprises at its 3′ end SEQ ID NO: 1214, 1218, 1222, 1226, 1230, 1234, 1238, 1242, 1246, 1250, 1254, 1258, 1262, 1266, 1270, 1274, 1278, or 1282. In some embodiments, the editing template has a length of 40 nucleotides or less. In some embodiments, the editing template has a length of 32 nucleotides or less. In some embodiments, the editing template is 26 to 32 nucleotides in length. In some embodiments, the PBS comprises at its 5′ end a sequence corresponding to sequence number 1192. In some embodiments, the PBS comprises sequence number 1192, 1193, 1194, 1195, 1196, 1197, 1198, 1199, 1200, 1201, 1202, 1203, 1204, 1205, or 1206. In some embodiments, the PBS has a length of 14 nucleotides or less. In some embodiments, the PBS is 8 to 14 nucleotides in length. In some embodiments, the PEgRNA comprises a sequence selected from any one of SEQ ID NOs: 1286-1329. In some embodiments, the PEgRNA comprises from 5′ to 3′, the spacer, the gRNA core, the RTT, and the PBS. In some embodiments, the spacer, the gRNA core, the RTT, and the PBS form a contiguous sequence in a single molecule. In some embodiments, the PEgRNA further comprises 3′ mN*mN*mN*N and 5′ mN*mN*mN* modifications, where m indicates that the nucleotide contains a 2′-O-Me modification and a * indicates the presence of a phosphorothioate bond. In some embodiments, the PEgRNA further comprises 3′ mT*mT*mT*T and 5′ mN*mN*mN* modifications, where m indicates that the nucleotide contains a 2′-O-Me modification, a * indicates the presence of a phosphorothioate bond, and a T indicates the presence of an additional uridine nucleotide.

[0013] In one aspect, provided herein is a prime editing guide RNA (PEgRNA), or a nucleic acid encoding the PEgRNA, wherein the PEgRNA comprises: a) a spacer comprising at its 3′ end SEQ ID NO: 1187; b) a gRNA core capable of binding to a Cas9 protein; and c) an extension arm comprising: i) an editing template comprising at its 3′ end any one of SEQ ID NOs: 1207, 1208, 1209, or 1210, and ii) a primer binding site (PBS) comprising at its 5′ end a sequence that is a reverse complement of nucleotides 10-14 of SEQ ID NO: 1187. In some embodiments, the spacer is from 17-22 nucleotides in length. In some embodiments, the spacer comprises at its 3′ end any one of SEQ ID NOs: 1188, 1189, 75, 1190, or 1191. In some embodiments, the spacer comprises at its 3′ end SEQ ID NO: 75. In some embodiments, the editing template comprises SEQ ID NO: 1208 at its 3′ end. In some embodiments, the editing template comprises at its 3′ end SEQ ID NO: 1212, 1216, 1220, 1224, 1228, 1232, 1236, 1240, 1244, 1248, 1252, 1256, 1260, 1264, 1268, 1272, 1276, or 1280. In some embodiments, the editing template comprises SEQ ID NO: 1207 at its 3′ end and encodes a CGG-to-CTG PAM silencing edit. In some embodiments, the editing template comprises at its 3′ end SEQ ID NO: 1211, 1215, 1219, 1223, 1227, 1231, 1235, 1239, 1243, 1247, 1251, 1255, 1259, 1263, 1267, 1271, 1275, or 1279. In some embodiments, the editing template comprises SEQ ID NO: 1209 at its 3′ end and encodes a CGG-to-CCG PAM silencing edit. In some embodiments, the editing template comprises at its 3′ end SEQ ID NO: 1213, 1217, 1221, 1225, 1229, 1233, 1237, 1241, 1245, 1249, 1253, 1257, 1261, 1265, 1269, 1273, 1277 or 1281. In some embodiments, the editing template comprises SEQ ID NO: 1210 at its 3′ end and encodes a CGG-to-CAG PAM silencing edit. In some embodiments, the editing template comprises at its 3′ end SEQ ID NO: 1214, 1218, 1222, 1226, 1230, 1234, 1238, 1242, 1246, 1250, 1254, 1258, 1262, 1266, 1270, 1274, 1278, or 1282. In some embodiments, the editing template has a length of 40 nucleotides or less. In some embodiments, the editing template has a length of 32 nucleotides or less. In some embodiments, the editing template is 26 to 32 nucleotides in length. In some embodiments, the PBS comprises at its 5′ end a sequence corresponding to sequence number 1192. In some embodiments, the PBS comprises sequence number 1192, 1193, 1194, 1195, 1196, 1197, 1198, 1199, 1200, 1201, 1202, 1203, 1204, 1205, or 1206. In some embodiments, the PBS has a length of 14 nucleotides or less. In some embodiments, the PBS is 8 to 14 nucleotides in length. In some embodiments, the PEgRNA comprises a sequence selected from any one of SEQ ID NOs: 1286-1329. In some embodiments, the PEgRNA comprises from 5′ to 3′, the spacer, the gRNA core, the RTT, and the PBS. In some embodiments, the spacer, the gRNA core, the RTT, and the PBS form a contiguous sequence in a single molecule. In some embodiments, the PEgRNA further comprises 3′ mN*mN*mN*N and 5′ mN*mN*mN* modifications, where m indicates that the nucleotide contains a 2′-O-Me modification and a * indicates the presence of a phosphorothioate bond. In some embodiments, the PEgRNA further comprises 3′ mT*mT*mT*T and 5′ mN*mN*mN* modifications, where m indicates that the nucleotide contains a 2′-O-Me modification, a * indicates the presence of a phosphorothioate bond, and a T indicates the presence of an additional uridine nucleotide.

[0014] In one aspect, provided herein is a prime editing system comprising: (a) the PEgRNA or the nucleic acid encoding the PEgRNA, of the disclosure or any of the aspects herein, and (b) a ngRNA, or a nucleic acid encoding the ngRNA, wherein the ngRNA comprises: (i) a spacer comprising at its 3′ end a sequence corresponding to nucleotides 4-20 of SEQ ID NO: 849, 850, 851, 520, 852, 853, 854, 1283, 862, 1284, 1285, 4, 855, 856, 857, or 858; and (ii) an ngRNA core capable of binding a Cas9 protein. In some embodiments, the spacer of the ngRNA comprises at its 3′ end SEQ ID NO: 849, 850, 851, 520, 852, 853, 854, 1283, 862, 1284, 1285, 4, 855, 856, 857, or 858. In some embodiments, the prime editing system further comprises: (c) a prime editor comprising a Cas9 nickase having a nuclease inactivating mutation in the HNH domain, or a nucleic acid encoding the Cas9 nickase, and a reverse transcriptase, or a nucleic acid encoding the reverse transcriptase. In some embodiments, the prime editor is a fusion protein. In some embodiments, the prime editing system further comprises: (c) an N-terminal extein comprising an N-terminal fragment of a prime editor fusion protein and an N-intein or a polynucleotide encoding the N-terminal extein; and (d) a C-terminal extein comprising a C-terminal fragment of the prime editor fusion protein and a C-intein, or a polynucleotide encoding the C-terminal extein; wherein the N-intein and the C-intein of the N-terminal and C-terminal exteins are capable of self-excision to join the N-terminal fragment and the C-terminal fragment to form the prime editor fusion protein, and wherein the prime editor fusion protein comprises a Cas9 nickase and a reverse transcriptase (RT) domain. In some embodiments, the Cas9 nickase comprises an amino acid sequence having at least 80%, 85%, 90%, 95%, 96%, 97%, 98%, 99%, or 100% identity to SEQ ID NO: 1867 or SEQ ID NO: 1868. In some embodiments, the reverse transcriptase comprises an amino acid sequence having at least 80%, 85%, 90%, 95%, 96%, 97%, 98%, 99%, or 100% identity to SEQ ID NO: 1864. In some embodiments, the sequence identities are determined by Needleman-Wunsch alignment of two protein sequences with Gap Costs set to Existence: 11 Extension: 1 where percent identity is calculated by dividing the number of identities by the length of the alignment.

[0015] In one aspect, provided herein is a prime editing guide RNA (PEgRNA) or a nucleic acid encoding the PEgRNA, wherein the PEgRNA comprises: a) a spacer that is complementary to a search target sequence on a first strand of a RHO gene wherein the spacer comprises at its 3′ end SEQ ID NO: 1330; b) a gRNA core capable of binding to a Cas9 protein; and c) an extension arm comprising: i) an editing template that comprises a region of complementarity to an editing target sequence on a second strand of the RHO gene, and ii) a primer binding site (PBS) that comprises at its 5′ end a sequence that is a reverse complement of nucleotides 10-14 of SEQ ID NO: 1330, wherein the first strand and second strand are complementary to each other, wherein the editing target sequence on the second strand comprises or is complementary to a portion of the RHO gene comprising a c.68 C→A substitution, and wherein the editing template encodes or comprises a wild type amino acid sequence of a Rhodopsin protein at the c.68 C→A substitution site. In some embodiments, the spacer is from 17-22 nucleotides in length. In some embodiments, the spacer comprises at its 3′ end any one of SEQ ID NOs: 1331, 1332, 855, 1333, or 1334. In some embodiments, the spacer comprises at its 3′ end SEQ ID NO: 855. In some embodiments, the editing template comprises SEQ ID NO: 1350 at its 3′ end. In some embodiments, the editing template has a length of 40 nucleotides or less. In some embodiments, the editing template has a length of 27 nucleotides or less. In some embodiments, the editing template is 21 to 27 nucleotides in length. In some embodiments, the editing template comprises at its 3′ end any one of SEQ ID NOs: 1351-1373. In some embodiments, the PBS comprises at its 5′ end a sequence corresponding to sequence number 1335. In some embodiments, the PBS comprises sequence number 1335, 1336, 1337, 1338, 1339, 1340, 1341, 1342, 1343, 1344, 1345, 1346, 1347, 1348, or 1349. In some embodiments, the PBS has a length of 14 nucleotides or less. In some embodiments, the PBS is 8 to 14 nucleotides in length. In some embodiments, the PEgRNA comprises a sequence selected from any one of SEQ ID NOs: 1374-1435. In some embodiments, the PEgRNA comprises from 5′ to 3′, the spacer, the gRNA core, the RTT, and the PBS. In some embodiments, the spacer, the gRNA core, the RTT, and the PBS form a contiguous sequence in a single molecule. In some embodiments, the PEgRNA further comprises 3′ mN*mN*mN*N and 5′ mN*mN*mN* modifications, where m indicates that the nucleotide contains a 2′-O-Me modification and a * indicates the presence of a phosphorothioate bond. In some embodiments, the PEgRNA further comprises 3′ mT*mT*mT*T and 5′ mN*mN*mN* modifications, where m indicates that the nucleotide contains a 2′-O-Me modification, a * indicates the presence of a phosphorothioate bond, and a T indicates the presence of an additional uridine nucleotide.

[0016] In one aspect, provided herein is a prime editing guide RNA (PEgRNA), or a nucleic acid encoding the PEgRNA, wherein the PEgRNA comprises: a) a spacer comprising at its 3′ end SEQ ID NO: 1330; b) a gRNA core capable of binding to a Cas9 protein; and c) an extension arm comprising: i) an editing template comprising at its 3′ end SEQ ID NO: 1350, and ii) a primer binding site (PBS) comprising at its 5′ end a sequence that is a reverse complement of nucleotides 10-14 of SEQ ID NO: 1330. In some embodiments, the spacer is from 17-22 nucleotides in length. In some embodiments, the spacer comprises at its 3′ end any one of SEQ ID NOs: 1331, 1332, 855, 1333, or 1334. In some embodiments, the spacer comprises at its 3′ end SEQ ID NO: 855. In some embodiments, the editing template comprises SEQ ID NO: 1350 at its 3′ end. In some embodiments, the editing template has a length of 40 nucleotides or less. In some embodiments, the editing template has a length of 27 nucleotides or less. In some embodiments, the editing template is 21 to 27 nucleotides in length. In some embodiments, the editing template comprises at its 3′ end any one of SEQ ID NOs: 1351-1373. In some embodiments, the PBS comprises at its 5′ end a sequence corresponding to sequence number 1335. In some embodiments, the PBS comprises sequence number 1335, 1336, 1337, 1338, 1339, 1340, 1341, 1342, 1343, 1344, 1345, 1346, 1347, 1348, or 1349. In some embodiments, the PBS has a length of 14 nucleotides or less. In some embodiments, the PBS is 8 to 14 nucleotides in length. In some embodiments, the PEgRNA comprises a sequence selected from any one of SEQ ID NOs: 1374-1435. In some embodiments, the PEgRNA comprises from 5′ to 3′, the spacer, the gRNA core, the RTT, and the PBS. In some embodiments, the spacer, the gRNA core, the RTT, and the PBS form a contiguous sequence in a single molecule. In some embodiments, the PEgRNA further comprises 3′ mN*mN*mN*N and 5′ mN*mN*mN* modifications, where m indicates that the nucleotide contains a 2′-O-Me modification and a * indicates the presence of a phosphorothioate bond. In some embodiments, the PEgRNA further comprises 3′ mT*mT*mT*T and 5′ mN*mN*mN* modifications, where m indicates that the nucleotide contains a 2′-O-Me modification, a * indicates the presence of a phosphorothioate bond, and a T indicates the presence of an additional uridine nucleotide.

[0017] In one aspect, provided herein is a prime editing system comprising: (a) the PEgRNA or the nucleic acid encoding the PEgRNA of the disclosure or any of the aspects herein, and (b) a ngRNA, or a nucleic acid encoding the ngRNA, wherein the ngRNA comprises: (i) a spacer comprising at its 3′ end a sequence corresponding to nucleotides 4-20 of SEQ ID NO: 72, 73, 74, 75, 76, 77, 78, 79, or 80; and (ii) an ngRNA core capable of binding a Cas9 protein. In some embodiments, the spacer of the ngRNA comprises at its 3′ end SEQ ID NO: 72, 73, 74, 75, 76, 77, 78, 79, or 80. In some embodiments, the prime editing system further comprises: (c) a prime editor comprising a Cas9 nickase having a nuclease inactivating mutation in the HNH domain, or a nucleic acid encoding the Cas9 nickase, and a reverse transcriptase, or a nucleic acid encoding the reverse transcriptase. In some embodiments, the prime editor is a fusion protein. In some embodiments, the prime editing system further comprises: (c) an N-terminal extein comprising an N-terminal fragment of a prime editor fusion protein and an N-intein or a polynucleotide encoding the N-terminal extein; and (d) a C-terminal extein comprising a C-terminal fragment of the prime editor fusion protein and a C-intein, or a polynucleotide encoding the C-terminal extein; wherein the N-intein and the C-intein of the N-terminal and C-terminal exteins are capable of self-excision to join the N-terminal fragment and the C-terminal fragment to form the prime editor fusion protein, and wherein the prime editor fusion protein comprises a Cas9 nickase and a reverse transcriptase (RT) domain. In some embodiments, the Cas9 nickase comprises an amino acid sequence having at least 80%, 85%, 90%, 95%, 96%, 97%, 98%, 99%, or 100% identity to SEQ ID NO: 1867 or SEQ ID NO: 1868. In some embodiments, the reverse transcriptase comprises an amino acid sequence having at least 80%, 85%, 90%, 95%, 96%, 97%, 98%, 99%, or 100% identity to SEQ ID NO: 1864. In some embodiments, the sequence identities are determined by Needleman-Wunsch alignment of two protein sequences with Gap Costs set to Existence: 11 Extension: 1 where percent identity is calculated by dividing the number of identities by the length of the alignment.

[0018] In one aspect, provided herein is a prime editing guide RNA (PEgRNA) or a nucleic acid encoding the PEgRNA, wherein the PEgRNA comprises: a) a spacer that is complementary to a search target sequence on a first strand of a RHO gene wherein the spacer comprises at its 3′ end SEQ ID NO: 1436; b) a gRNA core capable of binding to a Cas9 protein; and c.) an extension arm comprising: i) an editing template that comprises a region of complementarity to an editing target sequence on a second strand of the RHO gene, and ii) a primer binding site (PBS) that comprises at its 5′ end a sequence that is a reverse complement of nucleotides 10-14 of SEQ ID NO: 1436, wherein the first strand and second strand are complementary to each other, wherein the editing target sequence on the second strand comprises or is complementary to a portion of the RHO gene comprising a c.68 C→A substitution, and wherein the editing template encodes or comprises a wild type amino acid sequence of a Rhodopsin protein at the c.68 C→A substitution site. In some embodiments, the spacer is from 17-22 nucleotides in length. In some embodiments, the spacer comprises at its 3′ end any one of SEQ ID NOs: 1437, 1438, 78, 1439, or 1440. In some embodiments, the spacer comprises at its 3′ end SEQ ID NO: 78. In some embodiments, the editing template comprises SEQ ID NO: 1456 at its 3′ end. In some embodiments, the editing template comprises at its 3′ end SEQ ID NO: 1457, 1458, 1459, 1460, 1461, 1462, 1463, 1464, 1465, 1466, 1467, 1468, 1469, 1470, 1471, 1472, 1473, 1474, or 1475. In some embodiments, the editing template has a length of 40 nucleotides or less. In some embodiments, the editing template has a length of 31 nucleotides or less. In some embodiments, the editing template is 25 to 31 nucleotides in length. In some embodiments, the PBS comprises at its 5′ end a sequence corresponding to sequence number 1441. In some embodiments, the PBS comprises sequence number 1441, 1442, 1443, 1444, 1445, 1446, 1447, 1448, 1449, 1450, 1451, 1452, 1453, 1454, or 1455. In some embodiments, the PBS has a length of 14 nucleotides or less. In some embodiments, the PBS is 8 to 14 nucleotides in length. In some embodiments, the PEgRNA comprises a sequence selected from any one of SEQ ID NOs: 1476-1515. In some embodiments, the PEgRNA comprises from 5′ to 3′, the spacer, the gRNA core, the RTT, and the PBS. In some embodiments, the spacer, the gRNA core, the RTT, and the PBS form a contiguous sequence in a single molecule. In some embodiments, the PEgRNA further comprises 3′ mN*mN*mN*N and 5′ mN*mN*mN* modifications, where m indicates that the nucleotide contains a 2′-O-Me modification and a * indicates the presence of a phosphorothioate bond. In some embodiments, the PEgRNA further comprises 3′ mT*mT*mT*T and 5′ mN*mN*mN* modifications, where m indicates that the nucleotide contains a 2′-O-Me modification, a * indicates the presence of a phosphorothioate bond, and a T indicates the presence of an additional uridine nucleotide.

[0019] In one aspect, provided herein is a prime editing guide RNA (PEgRNA), or a nucleic acid encoding the PEgRNA, wherein the PEgRNA comprises: a) a spacer comprising at its 3′ end SEQ ID NO: 1436; b) a gRNA core capable of binding to a Cas9 protein; and c) an extension arm comprising: i) an editing template comprising at its 3′ end SEQ ID NO: 1456, and ii) a primer binding site (PBS) comprising at its 5′ end a sequence that is a reverse complement of nucleotides 10-14 of SEQ ID NO: 1436. In some embodiments, the spacer is from 17-22 nucleotides in length. In some embodiments, the spacer comprises at its 3′ end any one of SEQ ID NOs: 1437, 1438, 78, 1439, or 1440. In some embodiments, the spacer comprises at its 3′ end SEQ ID NO: 78. In some embodiments, the editing template comprises SEQ ID NO: 1456 at its 3′ end. In some embodiments, the editing template comprises at its 3′ end SEQ ID NO: 1457, 1458, 1459, 1460, 1461, 1462, 1463, 1464, 1465, 1466, 1467, 1468, 1469, 1470, 1471, 1472, 1473, 1474, or 1475. In some embodiments, the editing template has a length of 40 nucleotides or less. In some embodiments, the editing template has a length of 31 nucleotides or less. In some embodiments, the editing template is 25 to 31 nucleotides in length. In some embodiments, the PBS comprises at its 5′ end a sequence corresponding to sequence number 1441. In some embodiments, the PBS comprises sequence number 1441, 1442, 1443, 1444, 1445, 1446, 1447, 1448, 1449, 1450, 1451, 1452, 1453, 1454, or 1455. In some embodiments, the PBS has a length of 14 nucleotides or less. In some embodiments, the PBS is 8 to 14 nucleotides in length. In some embodiments, the PEgRNA comprises a sequence selected from any one of SEQ ID NOs: 1476-1515. In some embodiments, the PEgRNA comprises from 5′ to 3′, the spacer, the gRNA core, the RTT, and the PBS. In some embodiments, the spacer, the gRNA core, the RTT, and the PBS form a contiguous sequence in a single molecule. In some embodiments, the PEgRNA further comprises 3′ mN*mN*mN*N and 5′ mN*mN*mN* modifications, where m indicates that the nucleotide contains a 2′-O-Me modification and a * indicates the presence of a phosphorothioate bond. In some embodiments, the PEgRNA further comprises 3′ mT*mT*mT*T and 5′ mN*mN*mN* modifications, where m indicates that the nucleotide contains a 2′-O-Me modification, a * indicates the presence of a phosphorothioate bond, and a T indicates the presence of an additional uridine nucleotide.

[0020] In one aspect, provided herein is a prime editing system comprising: (a) a PEgRNA or the nucleic acid encoding the PEgRNA of the disclosure or any of the aspects herein, and (b) a ngRNA, or a nucleic acid encoding the ngRNA, wherein the ngRNA comprises: (i) a spacer comprising at its 3′ end a sequence corresponding to nucleotides 4-20 of SEQ ID NO: 849, 850, 851, 520, 852, 853, 854, 4, 855, 856, 857, or 858; and (ii) an ngRNA core capable of binding a Cas9 protein. In some embodiments, the spacer of the ngRNA comprises at its 3′ end SEQ ID NO: 849, 850, 851, 520, 852, 853, 854, 4, 855, 856, 857, or 858. In some embodiments, the prime editing system further comprises: (c) a prime editor comprising a Cas9 nickase having a nuclease inactivating mutation in the HNH domain, or a nucleic acid encoding the Cas9 nickase, and a reverse transcriptase, or a nucleic acid encoding the reverse transcriptase. In some embodiments, the prime editor is a fusion protein. In some embodiments, the prime editing system further comprises: (c) an N-terminal extein comprising an N-terminal fragment of a prime editor fusion protein and an N-intein or a polynucleotide encoding the N-terminal extein; and (d) a C-terminal extein comprising a C-terminal fragment of the prime editor fusion protein and a C-intein, or a polynucleotide encoding the C-terminal extein; wherein the N-intein and the C-intein of the N-terminal and C-terminal exteins are capable of self-excision to join the N-terminal fragment and the C-terminal fragment to form the prime editor fusion protein, and wherein the prime editor fusion protein comprises a Cas9 nickase and a reverse transcriptase (RT) domain. In some embodiments, the Cas9 nickase comprises an amino acid sequence having at least 80%, 85%, 90%, 95%, 96%, 97%, 98%, 99%, or 100% identity to SEQ ID NO: 1867 or SEQ ID NO: 1868. In some embodiments, the reverse transcriptase comprises an amino acid sequence having at least 80%, 85%, 90%, 95%, 96%, 97%, 98%, 99%, or 100% identity to SEQ ID NO: 1864. In some embodiments, the sequence identities are determined by Needleman-Wunsch alignment of two protein sequences with Gap Costs set to Existence: 11 Extension: 1 where percent identity is calculated by dividing the number of identities by the length of the alignment.

[0021] In one aspect, provided herein is a prime editing guide RNA (PEgRNA) or a nucleic acid encoding the PEgRNA, wherein the PEgRNA comprises: a) a spacer that is complementary to a search target sequence on a first strand of a RHO gene wherein the spacer comprises at its 3′ end SEQ ID NO: 1516; and b) a gRNA core capable of binding to a Cas9 protein; c) an extension arm comprising: i) an editing template that comprises a region of complementarity to an editing target sequence on a second strand of the RHO gene, and ii) a primer binding site (PBS) that comprises at its 5′ end a sequence that is a reverse complement of nucleotides 10-14 of SEQ ID NO: 1516, wherein the first strand and second strand are complementary to each other, wherein the editing target sequence on the second strand comprises or is complementary to a portion of the RHO gene comprising a c.68 C→A substitution, and wherein the editing template encodes or comprises a wild type amino acid sequence of a Rhodopsin protein at the c.68 C→A substitution site. In some embodiments, the spacer is from 17-22 nucleotides in length. In some embodiments, the spacer comprises at its 3′ end any one of SEQ ID NOs: 1517, 1518, 850, 1519, or 1520. In some embodiments, the spacer comprises at its 3′ end SEQ ID NO: 850. In some embodiments, the editing template comprises SEQ ID NO: 1536 at its 3′ end. In some embodiments, the editing template comprises at its 3′ end SEQ ID NO: 1542, 1548, 1554, 1560, 1566, 1572, 1578, 1584, 1590, 1596, 1602 or 1608. In some embodiments, the editing template comprises SEQ ID NO: 1540 at its 3′ end and encodes a AGG-to-AAA PAM silencing edit. In some embodiments, the editing template comprises at its 3′ end SEQ ID NO: 1546, 1552, 1558, 1564, 1570, 1576, 1582, 1588, 1594, 1600, 1606, or 1612. In some embodiments, the editing template comprises SEQ ID NO: 1537 at its 3′ end and encodes a AGG-to-AAG PAM silencing edit. In some embodiments, the editing template comprises at its 3′ end SEQ ID NO: 1543, 1549, 1555, 1561, 1567, 1573, 1579, 1585, 1591, 1597, 1603, or 1609. In some embodiments, the editing template comprises SEQ ID NO: 1538 at its 3′ end and encodes a AGG-to-AAG PAM silencing edit. In some embodiments, the editing template comprises at its 3′ end SEQ ID NO: 1544, 1550, 1556, 1562, 1568, 1574, 1580, 1586, 1592, 1598, 1604, or 1610. In some embodiments, the editing template comprises SEQ ID NO: 1539 at its 3′ end and encodes a AGG-to-AGA PAM silencing edit. In some embodiments, the editing template comprises at its 3′ end SEQ ID NO: 1545, 1551, 1557, 1563, 1569, 1575, 1581, 1587, 1593, 1599, 1605, or 1611. In some embodiments, the editing template comprises SEQ ID NO: 1541 at its 3′ end and encodes a AGG-to-AAA PAM silencing edit. In some embodiments, the editing template comprises at its 3′ end SEQ ID NO: 1547, 1553, 1559, 1565, 1571, 1577, 1583, 1589, 1595, 1601, 1607, or 1613. In some embodiments, the editing template has a length of 40 nucleotides or less. In some embodiments, the editing template has a length of 38 nucleotides or less. In some embodiments, the editing template is 32 to 38 nucleotides in length. In some embodiments, the PBS comprises at its 5′ end a sequence corresponding to sequence number 1521. In some embodiments, the PBS comprises sequence number 1521, 1522, 1523, 1524, 1525, 1526, 1527, 1528, 1529, 1530, 1531, 1532, 1533, 1534, or 1535. In some embodiments, the PBS has a length of 14 nucleotides or less. In some embodiments, the PBS is 8 to 14 nucleotides in length. In some embodiments, the PEgRNA comprises a sequence selected from any one of SEQ ID NOs: 1617-1646. In some embodiments, the PEgRNA comprises from 5′ to 3′, the spacer, the gRNA core, the RTT, and the PBS. In some embodiments, the spacer, the gRNA core, the RTT, and the PBS form a contiguous sequence in a single molecule. In some embodiments, the PEgRNA further comprises 3′ mN*mN*mN*N and 5′ mN*mN*mN* modifications, where m indicates that the nucleotide contains a 2′-O-Me modification and a * indicates the presence of a phosphorothioate bond. In some embodiments, the PEgRNA further comprises 3′ mT*mT*mT*T and 5′ mN*mN*mN* modifications, where m indicates that the nucleotide contains a 2′-O-Me modification, a * indicates the presence of a phosphorothioate bond, and a T indicates the presence of an additional uridine nucleotide.

[0022] In one aspect, provided herein is a prime editing guide RNA (PEgRNA), or a nucleic acid encoding the PEgRNA, wherein the PEgRNA comprises: a) a spacer comprising at its 3′ end SEQ ID NO: 1516; b) a gRNA core capable of binding to a Cas9 protein; and c) an extension arm comprising: i) an editing template comprising at its 3′ end any one of SEQ ID NOs: 1536-1541, and ii) a primer binding site (PBS) comprising at its 5′ end a sequence that is a reverse complement of nucleotides 10-14 of SEQ ID NO: 1516. In some embodiments, the spacer is from 17-22 nucleotides in length. In some embodiments, the spacer comprises at its 3′ end any one of SEQ ID NOs: 1517, 1518, 850, 1519, or 1520. In some embodiments, the spacer comprises at its 3′ end SEQ ID NO: 850. In some embodiments, the editing template comprises SEQ ID NO: 1536 at its 3′ end. In some embodiments, the editing template comprises at its 3′ end SEQ ID NO: 1542, 1548, 1554, 1560, 1566, 1572, 1578, 1584, 1590, 1596, 1602 or 1608. In some embodiments, the editing template comprises SEQ ID NO: 1540 at its 3′ end and encodes a AGG-to-AAA PAM silencing edit. In some embodiments, the editing template comprises at its 3′ end SEQ ID NO: 1546, 1552, 1558, 1564, 1570, 1576, 1582, 1588, 1594, 1600, 1606, or 1612. In some embodiments, the editing template comprises SEQ ID NO: 1537 at its 3′ end and encodes a AGG-to-AAG PAM silencing edit. In some embodiments, the editing template comprises at its 3′ end SEQ ID NO: 1543, 1549, 1555, 1561, 1567, 1573, 1579, 1585, 1591, 1597, 1603, or 1609. In some embodiments, the editing template comprises SEQ ID NO: 1538 at its 3′ end and encodes a AGG-to-AAG PAM silencing edit. In some embodiments, the editing template comprises at its 3′ end SEQ ID NO: 1544, 1550, 1556, 1562, 1568, 1574, 1580, 1586, 1592, 1598, 1604, or 1610. In some embodiments, the editing template comprises SEQ ID NO: 1539 at its 3′ end and encodes a AGG-to-AGA PAM silencing edit. In some embodiments, the editing template comprises at its 3′ end SEQ ID NO: 1545, 1551, 1557, 1563, 1569, 1575, 1581, 1587, 1593, 1599, 1605, or 1611. In some embodiments, the editing template comprises SEQ ID NO: 1541 at its 3′ end and encodes a AGG-to-AAA PAM silencing edit. In some embodiments, the editing template comprises at its 3′ end SEQ ID NO: 1547, 1553, 1559, 1565, 1571, 1577, 1583, 1589, 1595, 1601, 1607, or 1613. In some embodiments, the editing template has a length of 40 nucleotides or less. In some embodiments, the editing template has a length of 38 nucleotides or less. In some embodiments, the editing template is 32 to 38 nucleotides in length. In some embodiments, the PBS comprises at its 5′ end a sequence corresponding to sequence number 1521. In some embodiments, the PBS comprises sequence number 1521, 1522, 1523, 1524, 1525, 1526, 1527, 1528, 1529, 1530, 1531, 1532, 1533, 1534, or 1535. In some embodiments, the PBS has a length of 14 nucleotides or less. In some embodiments, the PBS is 8 to 14 nucleotides in length. In some embodiments, the PEgRNA comprises a sequence selected from any one of SEQ ID NOs: 1617-1646. In some embodiments, the PEgRNA comprises from 5′ to 3′, the spacer, the gRNA core, the RTT, and the PBS. In some embodiments, the spacer, the gRNA core, the RTT, and the PBS form a contiguous sequence in a single molecule. In some embodiments, the PEgRNA further comprises 3′ mN*mN*mN*N and 5′ mN*mN*mN* modifications, where m indicates that the nucleotide contains a 2′-O-Me modification and a * indicates the presence of a phosphorothioate bond. In some embodiments, the PEgRNA further comprises 3′ mT*mT*mT*T and 5′ mN*mN*mN* modifications, where m indicates that the nucleotide contains a 2′-O-Me modification, a * indicates the presence of a phosphorothioate bond, and a T indicates the presence of an additional uridine nucleotide.

[0023] In one aspect, provided herein is a prime editing system comprising: (a) the PEgRNA or the nucleic acid encoding the PEgRNA of the disclosure or any of the aspects herein, and (b) a ngRNA, or a nucleic acid encoding the ngRNA, wherein the ngRNA comprises: (i) a spacer comprising at its 3′ end a sequence corresponding to nucleotides 4-20 of SEQ ID NO: 72, 73, 74, 82, 1614, 1615, 1616, 75, 76, 77, or 78; and (ii) an ngRNA core capable of binding a Cas9 protein. In some embodiments, the spacer of the ngRNA comprises at its 3′ end SEQ ID NO: 72, 73, 74, 82, 1614, 1615, 1616, 75, 76, 77, or 78. In some embodiments, the prime editing system further comprises: (c) a prime editor comprising a Cas9 nickase having a nuclease inactivating mutation in the HNH domain, or a nucleic acid encoding the Cas9 nickase, and a reverse transcriptase, or a nucleic acid encoding the reverse transcriptase. In some embodiments, the prime editor is a fusion protein. In some embodiments, the prime editing system further comprises: (c) an N-terminal extein comprising an N-terminal fragment of a prime editor fusion protein and an N-intein or a polynucleotide encoding the N-terminal extein; and (d) a C-terminal extein comprising a C-terminal fragment of the prime editor fusion protein and a C-intein, or a polynucleotide encoding the C-terminal extein; wherein the N-intein and the C-intein of the N-terminal and C-terminal exteins are capable of self-excision to join the N-terminal fragment and the C-terminal fragment to form the prime editor fusion protein, and wherein the prime editor fusion protein comprises a Cas9 nickase and a reverse transcriptase (RT) domain. In some embodiments, the Cas9 nickase comprises an amino acid sequence having at least 80%, 85%, 90%, 95%, 96%, 97%, 98%, 99%, or 100% identity to SEQ ID NO: 1867 or SEQ ID NO: 1868. In some embodiments, the reverse transcriptase comprises an amino acid sequence having at least 80%, 85%, 90%, 95%, 96%, 97%, 98%, 99%, or 100% identity to SEQ ID NO: 1864. In some embodiments, the sequence identities are determined by Needleman-Wunsch alignment of two protein sequences with Gap Costs set to Existence: 11 Extension: 1 where percent identity is calculated by dividing the number of identities by the length of the alignment.

[0024] In some embodiments, the PEgRNA comprises from 5′ to 3′, the spacer, the gRNA core, the RTT, and the PBS. In some embodiments, the spacer, the gRNA core, the RTT, and the PBS form a contiguous sequence in a single molecule. In some embodiments, the PEgRNA further comprises 3′ mN*mN*mN*N and 5′ mN*mN*mN* modifications, where m indicates that the nucleotide contains a 2′-O-Me modification and a * indicates the presence of a phosphorothioate bond. In some embodiments, the PEgRNA further comprises 3′ mT*mT*mT*T and 5′ mN*mN*mN* modifications, where m indicates that the nucleotide contains a 2′-O-Me modification, a * indicates the presence of a phosphorothioate bond, and a T indicates the presence of an additional uridine nucleotide.

[0025] In some embodiments, the prime editing system further comprises: (c) a prime editor comprising a Cas9 nickase having a nuclease inactivating mutation in the HNH domain, or a nucleic acid encoding the Cas9 nickase, and a reverse transcriptase, or a nucleic acid encoding the reverse transcriptase. In some embodiments, the prime editor is a fusion protein.

[0026] In some embodiments, the prime editing system further comprises: (c) an N-terminal extein comprising an N-terminal fragment of a prime editor fusion protein and an N-intein or a polynucleotide encoding the N-terminal extein; and (d) a C-terminal extein comprising a C-terminal fragment of the prime editor fusion protein and a C-intein, or a polynucleotide encoding the C-terminal extein; wherein the N-intein and the C-intein of the N-terminal and C-terminal exteins are capable of self-excision to join the N-terminal fragment and the C-terminal fragment to form the prime editor fusion protein, and wherein the prime editor fusion protein comprises a Cas9 nickase and a reverse transcriptase (RT) domain.

[0027] In one aspect, provided herein is a prime editing system comprising: (a) a PEgRNA of the disclosure or any of the aspects herein, or a nucleotide encoding the PEgRNA; and (b) a prime editor comprising a Cas9 nickase having a nuclease inactivating mutation in the HNH domain, or a nucleic acid encoding the Cas9 nickase, and a reverse transcriptase, or a nucleic acid encoding the reverse transcriptase. In some embodiments, the Cas9 nickase comprises an amino acid sequence having at least 80%, 85%, 90%, 95%, 96%, 97%, 98%, 99%, or 100% identity to SEQ ID NO: 1867 or SEQ ID NO: 1868. In some embodiments, the reverse transcriptase comprises an amino acid sequence having at least 80%, 85%, 90%, 95%, 96%, 97%, 98%, 99%, or 100% identity to SEQ ID NO: 1864. In some embodiments, the sequence identities are determined by Needleman-Wunsch alignment of two protein sequences with Gap Costs set to Existence: 11 Extension: 1 where percent identity is calculated by dividing the number of identities by the length of the alignment.

[0028] In one aspect, provided herein is a prime editing system comprising: (a) a PEgRNA of the disclosure or any of the aspects herein, or a nucleotide encoding the PEgRNA; (b) an N-terminal extein comprising an N-terminal fragment of a prime editor fusion protein and an N-intein or a polynucleotide encoding the N-terminal extein; and (c) a C-terminal extein comprising a C-terminal fragment of the prime editor fusion protein and a C-intein, or a polynucleotide encoding the C-terminal extein; wherein the N-intein and the C-intein of the N-terminal and C-terminal exteins are capable of self-excision to join the N-terminal fragment and the C-terminal fragment to form the prime editor fusion protein, and wherein the prime editor fusion protein comprises a Cas9 nickase and a reverse transcriptase (RT) domain.

[0029] In some embodiments, the Cas9 nickase comprises an amino acid sequence having at least 80%, 85%, 90%, 95%, 96%, 97%, 98%, 99%, or 100% identity to SEQ ID NO: 1867 or SEQ ID NO: 1868. In some embodiments, the reverse transcriptase comprises an amino acid sequence having at least 80%, 85%, 90%, 95%, 96%, 97%, 98%, 99%, or 100% identity to SEQ ID NO: 1864. In some embodiments, the sequence identities are determined by Needleman-Wunsch alignment of two protein sequences with Gap Costs set to Existence: 11 Extension: 1 where percent identity is calculated by dividing the number of identities by the length of the alignment.

[0030] In one aspect, provided herein is a population of viral particles collectively comprising the one or more nucleic acids encoding the prime editing system of the disclosure or any one of the aspects herein. In some embodiments, the viral particles are AAV particles.

[0031] In one aspect, provided herein is a LNP comprising the prime editing system of the disclosure or any one of the aspects herein. In some embodiments, the LNP comprises the PEgRNA, the nucleic acid encoding the Cas9 nickase, and the nucleic acid encoding the reverse transcriptase. In some embodiments, the nucleic acid encoding the Cas9 nickase and the nucleic acid encoding the reverse transcriptase are mRNA. In some embodiments, the nucleic acid encoding the Cas9 nickase and the nucleic acid encoding the reverse transcriptase are the same molecule.

[0032] In one aspect, provided herein is a method of correcting or editing a RHO gene, the method comprising contacting the RHO gene with: (a) a PEgRNA of the disclosure or any one of the aspects herein and a prime editor comprising a Cas9 nickase having a nuclease inactivating mutation in the HNH domain and a reverse transcriptase or (b) a prime editing system of the disclosure or any one of the aspects herein. In some embodiments, the RHO gene is in a cell. In some embodiments, the cell is a mammalian cell. In some embodiments, the cell is a human cell. In some embodiments, the cell is a primary cell. In some embodiments, the cell is in a subject. In some embodiments, the subject is a human. In some embodiments, the cell is from a subject having Retinitis pigmentosa. In some embodiments, contacting the RHO gene comprises contacting the cell with (i) a population of viral particles of the disclosure or any of the aspects herein or (ii) the LNP of the disclosure or any of the aspects herein.

[0033] In one aspect, provided herein is a method for treating Retinitis pigmentosa in a subject in need thereof, the method comprising administering to the subject: (A) a PEgRNA of the disclosure or any of the aspects herein and a prime editor comprising a Cas9 nickase having a nuclease inactivating mutation in the HNH domain and a reverse transcriptase, (B) a prime editing system of the disclosure or any of the aspects herein, (C) a population of viral particles of the disclosure or any of the aspects herein or (D) a LNP of the disclosure or any of the aspects herein.

[0034] In one aspect, provided herein is a prime editing guide RNA (PEgRNA) comprising: a) a spacer comprising at its 3′ end a PEgRNA Spacer sequence selected from any one of Tables 1-7; b) a gRNA core capable of binding to a Cas9 protein; and c) an extension arm comprising: i) an editing template comprising at its 3′ end an RTT sequence selected from the same Table as the PEgRNA Spacer sequence, and ii) a primer binding site (PBS) comprising at its 5′ end a PBS sequence selected from the same Table as the PEgRNA Spacer sequence. In some embodiments, the spacer of the PEgRNA is from 17 to 22 nucleotides in length. In some embodiments, the spacer of the PEgRNA is 20 nucleotides in length. In some embodiments, the PEgRNA comprises from 5′ to 3′, the spacer, the gRNA core, the editing template, and the PBS. In some embodiments, the spacer, the gRNA core, the editing template, and the PBS form a contiguous sequence in a single molecule. In some embodiments, the gRNA core comprises SEQ ID NO: 1854, 1855, 1856, 1857, 1858, or 1859.

[0035] In one aspect, provided herein is a prime editing system comprising: (a) a prime editing guide RNA (PEgRNA) of the disclosure or any of the aspects herein, or a nucleic acid encoding the PEgRNA; and optionally (b) a nick guide RNA (ngRNA), or a nucleic acid encoding the ngRNA, wherein the ngRNA comprises a spacer comprising at its 3′ end nucleotides 4-20 of any ngRNA Spacer sequence selected from the same Table as the PEgRNA Spacer sequence, and a gRNA core capable of binding to a Cas9 protein. In some embodiments, the spacer of the ngRNA is from 17 to 22 nucleotides in length. In some embodiments, the spacer of the ngRNA comprises at its 3′ end nucleotides 3-20, 2-20, or 1-20 of the ngRNA Spacer sequence selected from the same Table as the PEgRNA Spacer sequence. In some embodiments, the spacer of the ngRNA comprises at its 3′ end the ngRNA Spacer sequence selected from the same Table as the PEgRNA Spacer sequence. In some embodiments, the spacer of the ngRNA is 20 nucleotides in length. In some embodiments, the gRNA core of the ngRNA comprises SEQ ID NO: 1854. In some embodiments, the prime editing system further comprises: (c) a prime editor comprising a Cas9 nickase having a nuclease inactivating mutation in the HNH domain, or a nucleic acid encoding the Cas9 nickase, and a reverse transcriptase, or a nucleic acid encoding the reverse transcriptase. In some embodiments, the prime editing system further comprises: (c) an N-terminal extein comprising an N-terminal fragment of a prime editor fusion protein and an N-intein or a polynucleotide encoding the N-terminal extein; and (d) a C-terminal extein comprising a C-terminal fragment of the prime editor fusion protein and a C-intein, or a polynucleotide encoding the C-terminal extein; wherein the N-intein and the C-intein of the N-terminal and C-terminal exteins are capable of self-excision to join the N-terminal fragment and the C-terminal fragment to form the prime editor fusion protein, and wherein the prime editor fusion protein comprises a Cas9 nickase and a reverse transcriptase (RT) domain. In some embodiments, the Cas9 nickase comprises an amino acid sequence having at least 80%, 85%, 90%, 95%, 96%, 97%, 98%, 99%, or 100% identity to SEQ ID NO: 1867 or SEQ ID NO: 1868. In some embodiments, the reverse transcriptase comprises an amino acid sequence having at least 80%, 85%, 90%, 95%, 96%, 97%, 98%, 99%, or 100% identity to SEQ ID NO: 1864. In some embodiments, the sequence identities are determined by Needleman-Wunsch alignment of two protein sequences with Gap Costs set to Existence: 11 Extension: 1 where percent identity is calculated by dividing the number of identities by the length of the alignment. In some embodiments, the prime editing system comprises the ngRNA.

### INCORPORATION BY REFERENCE

[0036] All publications, patents, and patent applications mentioned in this specification are herein incorporated by reference to the same extent as if each individual publication, patent, or patent application was specifically and individually indicated to be incorporated by reference.

### BRIEF DESCRIPTION OF THE DRAWINGS

[0037] The novel features of the disclosure are set forth with particularity in the appended claims. A better understanding of the features and advantages of the present disclosure will be obtained by reference to the following detailed description that sets forth illustrative embodiments, in which the principles of the disclosure are utilized, and the accompanying drawings of which:

[0038] FIG. 1 depicts a schematic of a prime editing guide RNA (PEgRNA) binding to a double stranded target DNA sequence.

[0039] FIG. 2 depicts a PEgRNA architectural overview in an exemplary schematic of PEgRNA designed for a prime editor.

[0040] FIG. 3 is a schematic showing the spacer and gRNA core part of an exemplary guide RNA, in two separate molecules. The rest of the PEgRNA structure is not shown.

### DETAILED DESCRIPTION

[0041] Provided herein, in some embodiments, are compositions and methods to edit the target gene RHO with prime editing. In certain embodiments, provided herein are compositions and methods for correction of mutations in the RHO gene associated with retinitis pigmentosa. Compositions provided herein can comprise prime editors (PEs) that may use engineered guide polynucleotides, e.g., prime editing guide RNAs (PEgRNAs), that can direct PEs to specific DNA targets and can encode DNA edits on the target gene RHO that serve a variety of functions, including direct correction of disease-causing mutations.

[0042] The following description and examples illustrate embodiments of the present disclosure in detail. It is to be understood that this disclosure is not limited to the particular embodiments described herein and as such can vary. Those of skill in the art will recognize that there are numerous variations and modifications of this disclosure, which are encompassed within its scope. Although various features of the present disclosure can be described in the context of a single embodiment, the features can also be provided separately or in any suitable combination. Conversely, although the present disclosure can be described herein in the context of separate embodiments for clarity, the present disclosure can also be implemented in a single embodiment.

### Definitions

[0043] Unless defined otherwise, all technical and scientific terms used herein have the same meaning as is commonly understood by one of ordinary skill in the art.

[0044] The terminology used herein is for the purpose of describing particular embodiments only and is not intended to be limiting. As used herein, the singular forms “a”, “an” and “the” are intended to include the plural forms as well, unless the context clearly indicates otherwise. Furthermore, to the extent that the terms “including”, “includes”, “having”, “has”, “with”, or variants thereof as used herein mean “comprising”.

[0045] Unless otherwise specified, the words “comprising”, “comprise”, “comprises”, “having”, “have”, “has”, “including”, “includes”, “include”, “containing”, “contains” and “contain” are inclusive or open-ended and do not exclude additional, unrecited elements or method steps.

[0046] Reference to “some embodiments”, “an embodiment”, “one embodiment”, or “other embodiments” means that a particular feature or characteristic described in connection with the embodiments is included in at least one or more embodiments, but not necessarily all embodiments, of the present disclosure.

[0047] The term “about” or “approximately” in relation to a numerical means, a range of values that fall within 10% greater than or less than the value. For example, about x means x±(10%*x).

[0048] In some embodiments, the cell is a human cell. A cell may be of or derived from different tissues, organs, and/or cell types. In some embodiments, the cell is a primary cell. As used herein, the term “primary cell” means a cell isolated from an organism, e.g., a mammal, which is grown in tissue culture (i.e., in vitro) for the first time before subdivision and transfer to a subculture. In some non-limiting examples, mammalian cells, including primary cells and stem cells can be modified through introduction of one or more polynucleotides, polypeptide, and/or prime editing compositions (e.g., through transfection, transduction, electroporation and the like) and further passaged. Such modified cells include retinal cells (e.g., photoreceptors, retinal pigment epithelium cells), epithelial cells (e.g., mammary epithelial cells, intestinal epithelial cells, hepatocytes), endothelial cells, glial cells, neural cells, formed elements of the blood (e.g., lymphocytes, bone marrow cells), precursors of any of these somatic cell types, and stem cells. In some embodiments, the cell is a fibroblast. In some embodiments, the cell is a stem cell. In some embodiments, the cell is a pluripotent cell (e.g., a pluripotent stem cell). In some embodiments, the cell (e.g., a stem cell) is an embryonic stem cell, tissue-specific stem cell, mesenchymal stem cell, or an induced pluripotent stem cell. In some embodiments, the cell is an induced pluripotent stem cell (iPSC). In some embodiments, the cell is a retinal progenitor cell. In some embodiments, the cell is a retinal precursor cell. In some embodiments, the cell is an embryonic stem cell (ESC). In some embodiments, the cell is a human stem cell. In some embodiments, the cell is a human pluripotent stem cell. In some embodiments, the cell is a human fibroblast. In some embodiments, the cell is an induced human pluripotent stem cell. In some embodiments, the cell is a human stem cell. In some embodiments, the cell is a human embryonic stem cell. In some embodiments, the cell is a human retinal progenitor cell. In some embodiments, the cell is a human retinal precursor cell.

[0049] In some embodiments, a cell is not isolated from an organism but forms part of a tissue or organ of an organism, e.g., a mammal. In some non-limiting examples, mammalian cells include muscle cells (e.g., cardiac muscle cells, smooth muscle cells, myosatellite cells), epithelial cells (e.g., mammary epithelial cells, intestinal epithelial cells, hepatocytes), endothelial cells, glial cells, neural cells, formed elements of the blood (e.g., lymphocytes, bone marrow cells), precursors of any of these somatic cell types, and stem cells. In some embodiments, the cell is a pigmented epithelial cell. In some embodiments, the cell is a retinal cell. In some embodiments, the cell is a photoreceptor cell. In some embodiments, the cell is a rod cell. In some embodiments, the cell is a cone cell. In some embodiments, the cell is a human stem cell.

[0050] In some embodiments, the cell is a differentiated cell. In some embodiments, cell is a fibroblast. In some embodiments, the cell is differentiated from an induced pluripotent stem cell. In some embodiments, the cell is a retinal cell, a pigmented epithelial cell, a rod cell, a cone cell, or a retinal ganglion differentiated from an iPSC, ESC or a retinal progenitor cell.

[0051] In some embodiments, the cell is a differentiated human cell. In some embodiments, cell is a human fibroblast. In some embodiments, the cell is differentiated from an induced human pluripotent stem cell. In some embodiments, the cell is a retinal cell, a pigmented epithelial cell, a rod cell, a cone cell, or a retinal ganglion differentiated from a human iPSC, a human ESC or a human retinal progenitor cell. In some embodiments, the cell edited by prime editing can be differentiated into, or give rise to recovery of a population of cells, e.g., a retinal cell, a pigmented epithelial cell, a rod cell, a cone cell, or a retinal ganglion. In some embodiments, the cell is in a subject, e.g., a human subject. In some embodiments, the cell is obtained from a subject prior to editing. For example, in some embodiments, the cell is obtained from a retinitis pigmentosa patient having a mutation in the RHO gene.

[0052] In some embodiments, the cell comprises a prime editor, a PEgRNA, or a prime editing composition disclosed herein. In some embodiments, the cell further comprises an ngRNA. In some embodiments, the cell is from a human subject. In some embodiments, the human subject has a disease or a condition, or is at a risk of developing a disease or a condition associated with a mutation to be corrected by prime editing, for example, retinitis pigmentosa. In some embodiments, the cell is from a human subject, and comprises a prime editor, a PEgRNA, or a prime editing composition for correction of the mutation. In some embodiments, the cell is from the human subject and the mutation has been edited or corrected by prime editing. In some embodiments, the cell is in a human subject, and comprises a prime editor or a prime editing composition for correction of the mutation. In some embodiments, the cell is from the human subject and the mutation has been edited or corrected by prime editing.

[0053] The term “substantially” as used herein may refer to a value approaching 100% of a given value. In some embodiments, the term may refer to an amount that may be at least about 70%, 80%, 90%, 91%, 92%, 93%, 94%, 95%, 96%, 97%, 98%, 99%, 99.9%, or 99.99% of a total amount. In some embodiments, the term may refer to an amount that may be about 100% of a total amount.

[0054] The terms “protein” and “polypeptide” can be used interchangeably to refer to a polymer of two or more amino acids joined by covalent bonds (e.g., an amide bond) that can adopt a three-dimensional conformation. In some embodiments, a protein or polypeptide comprises at least 10 amino acids, 15 amino acids, 20 amino acids, 30 amino acids or 50 amino acids joined by covalent bonds (e.g., amide bonds). In some embodiments, a protein comprises at least two amide bonds. In some embodiments, a protein comprises multiple amide bonds. In some embodiments, a protein comprises an enzyme, enzyme precursor proteins, regulatory protein, structural protein, receptor, nucleic acid binding protein, a biomarker, a member of a specific binding pair (e.g., a ligand or aptamer), or an antibody. In some embodiments, a protein may be a full-length protein (e.g., a fully processed protein having certain biological function). In some embodiments, a protein may be a variant or a fragment of a full-length protein. For example, in some embodiments, a Cas9 protein domain comprises an H840A amino acid substitution compared to a naturally occurring S. pyogenes Cas9 protein. A variant of a protein or enzyme, for example a variant reverse transcriptase, comprises a polypeptide having an amino acid sequence that is about 60% identical, about 70% identical, about 80% identical, about 90% identical, about 95% identical, about 96% identical, about 97% identical, about 98% identical, about 99% identical, about 99.5% identical, or about 99.9% identical to the amino acid sequence of a reference protein.

[0055] In some embodiments, a protein comprises one or more protein domains or subdomains. As used herein, the term “polypeptide domain”, “protein domain”, or “domain” when used in the context of a protein or polypeptide, refers to a polypeptide chain that has one or more biological functions, e.g., a catalytic function, a protein-protein binding function, or a protein-DNA function. In some embodiments, a protein comprises multiple protein domains. In some embodiments, a protein comprises multiple protein domains that are naturally occurring. In some embodiments, a protein comprises multiple protein domains from different naturally occurring proteins. For example, in some embodiments, a prime editor may be a fusion protein comprising a Cas9 protein domain of S. pyogenes and a reverse transcriptase protein domain of a retrovirus (e.g., a Moloney murine leukemia virus) or a variant of the retrovirus. A protein that comprises amino acid sequences from different origins or naturally occurring proteins may be referred to as a fusion, or chimeric protein.

[0056] In some embodiments, a protein comprises a functional variant or functional fragment of a full-length wild type protein. A “functional fragment” or “functional portion”, as used herein, refers to any portion of a reference protein (e.g., a wild type protein) that encompasses less than the entire amino acid sequence of the reference protein while retaining one or more of the functions, e.g., catalytic or binding functions. For example, a functional fragment of a reverse transcriptase may encompass less than the entire amino acid sequence of a wild type reverse transcriptase, but retains the ability under at least one set of conditions to catalyze the polymerization of a polynucleotide. When the reference protein is a fusion of multiple functional domains, a functional fragment thereof may retain one or more of the functions of at least one of the functional domains. For example, a functional fragment of a Cas9 may encompass less than the entire amino acid sequence of a wild type Cas9, but retains its DNA binding ability and lacks its nuclease activity partially or completely.

[0057] A “functional variant” or “functional mutant”, as used herein, refers to any variant or mutant of a reference protein (e.g., a wild type protein) that encompasses one or more alterations to the amino acid sequence of the reference protein while retaining one or more of the functions, e.g., catalytic or binding functions. In some embodiments, the one or more alterations to the amino acid sequence comprises amino acid substitutions, insertions or deletions, or any combination thereof. In some embodiments, the one or more alterations to the amino acid sequence comprises amino acid substitutions. For example, a functional variant of a reverse transcriptase may comprise one or more amino acid substitutions compared to the amino acid sequence of a wild type reverse transcriptase, but retains the ability under at least one set of conditions to catalyze the polymerization of a polynucleotide. When the reference protein is a fusion of multiple functional domains, a functional variant thereof may retain one or more of the functions of at least one of the functional domains. For example, in some embodiments, a functional fragment of a Cas9 may comprise one or more amino acid substitutions in a nuclease domain, e.g., an H840A amino acid substitution, compared to the amino acid sequence of a wild type Cas9, but retains the DNA binding ability and lacks the nuclease activity partially or completely.

[0058] The term “function” and its grammatical equivalents as used herein may refer to a capability of operating, having, or serving an intended purpose. Functional may comprise any percent from baseline to 100% of an intended purpose. For example, functional may comprise or comprise about 5%, 10%, 15%, 20%, 25%, 30%, 35%, 40%, 45%, 50%, 55%, 60%, 65%, 70%, 75%, 80%, 85%, 90%, 95%, or up to about 100% of an intended purpose. In some embodiments, the term functional may mean over or over about 100% of normal function, for example, 125%, 150%, 175%, 200%, 250%, 300%, 400%, 500%, 600%, 700% or up to about 1000% of an intended purpose.

[0059] In some embodiments, a protein or polypeptides includes naturally occurring amino acids (e.g., one of the twenty amino acids commonly found in peptides synthesized in nature, and known by the one letter abbreviations A, R, N, C, D, Q, E, G, H, I, L, K, M, F, P, S, T, W, Y and V). In some embodiments, a protein or polypeptides includes non-naturally occurring amino acids (e.g., amino acids which is not one of the twenty amino acids commonly found in peptides synthesized in nature, including synthetic amino acids, amino acid analogs, and amino acid mimetics). In some embodiments, a protein or polypeptide is modified.

[0060] In some embodiments, a protein comprises an isolated polypeptide. The term “isolated” means free or removed to varying degrees from components which normally accompany it as found in the natural state or environment. For example, a polypeptide naturally present in a living animal is not isolated, and the same polypeptide partially or completely separated from the coexisting materials of its natural state is isolated.

[0061] In some embodiments, a protein is present within a cell, a tissue, an organ, or a virus particle. In some embodiments, a protein is present within a cell or a part of a cell (e.g., a bacteria cell, a plant cell, or an animal cell). In some embodiments, the cell is in a tissue, in a subject, or in a cell culture. In some embodiments, the cell is a microorganism (e.g., a bacterium, fungus, protozoan, or virus). In some embodiments, a protein is present in a mixture of analytes (e.g., a lysate). In some embodiments, the protein is present in a lysate from a plurality of cells or from a lysate of a single cell.

[0062] The terms “homologous,” “homology,” or “percent homology” as used herein refer to the degree of sequence identity between an amino acid and a corresponding reference amino acid sequence or a polynucleotide sequence and a corresponding reference polynucleotide sequence. “Homology” can refer to polymeric sequences, e.g., polypeptide or DNA sequences that are similar. Homology can mean, for example, nucleic acid sequences with at least about: 50%, 55%, 60%, 65%, 70%, 75%, 80%, 81%, 82%, 83%, 84%, 85%, 86%, 87%, 88%, 89%, 90%, 91%, 92%, 93%, 94%, 95%, 96%, 97%, 98%, 99%, or 100% identity. In other embodiments, a “homologous sequence” of nucleic acid sequences may exhibit 93%, 95% or 98% sequence identity to the reference nucleic acid sequence. For example, a “region of homology to a genomic region” can be a region of DNA that has a similar sequence to a given genomic region in the genome. A region of homology can be of any length that is sufficient to promote binding of a spacer, a primer binding site or protospacer sequence to the genomic region. For example, the region of homology can comprise at least 5, 10, 11, 12, 13, 14, 15, 16, 17, 18, 19, 20, 21, 22, 23, 24, 25, 30, 35, 40, 45, 50, 55, 60, 65, 70, 75, 80, 85, 90, 95, 100, 200, 300, 400, 500, 600, 700, 800, 900, 1000, 1100, 1200, 1300, 1400, 1500, 1600, 1700, 1800, 1900, 2000, 2100, 2200, 2300, 2400, 2500, 2600, 2700, 2800, 2900, 3000, 3100 or more bases in length such that the region of homology has sufficient homology to undergo binding with the corresponding genomic region.

[0063] When a percentage of sequence homology or identity is specified, in the context of two nucleic acid sequences or two polypeptide sequences, the percentage of homology or identity generally refers to the alignment of two or more sequences across a portion of their length when compared and aligned for maximum correspondence. When a position in the compared sequence can be occupied by the same base or amino acid, then the molecules can be homologous at that position. Unless stated otherwise, sequence homology or identity is assessed over the specified length of the nucleic acid, polypeptide or portion thereof. In some embodiments, the homology or identity is assessed over a functional portion or specified portion of the length.

[0064] Alignment of sequences for assessment of sequence homology can be conducted by algorithms known in the art, such as the Basic Local Alignment Search Tool (BLAST) algorithm, which is described in Altschul et al, J. Mol. Biol. 215:403-410, 1990. A publicly available, internet interface, for performing BLAST analyses is accessible through the National Center for Biotechnology Information. Additional known algorithms include those published in: Smith & Waterman, “Comparison of Biosequences”, Adv. Appl. Math. 2:482, 1981; Needleman & Wunsch, “A general method applicable to the search for similarities in the amino acid sequence of two proteins” J. Mol. Biol. 48:443, 1970; Pearson & Lipman “Improved tools for biological sequence comparison”, Proc. Natl. Acad. Sci. USA 85:2444, 1988; or by automated implementation of these or similar algorithms. Global alignment programs may also be used to align similar sequences of roughly equal size. Examples of global alignment programs include NEEDLE (available at www.ebi.ac.uk/Tools/psa/emboss_needle/) which is part of the EMBOSS package (Rice P et al., Trends Genet., 2000; 16: 276-277), and the GGSEARCH program https://fasta.bioch.virginia.edu/fasta_www2/, which is part of the FASTA package (Pearson W and Lipman D, 1988, Proc. Natl. Acad. Sci. USA, 85: 2444-2448). Both of these programs are based on the Needleman-Wunsch algorithm which is used to find the optimum alignment (including gaps) of two sequences along their entire length. A detailed discussion of sequence analysis can also be found in Unit 19.3 of Ausubel et al (“Current Protocols in Molecular Biology” John Wiley & Sons Inc, 1994-1998, Chapter 15, 1998). In some embodiments, alignment between a query sequence and a reference sequence is performed with Needleman-Wunsch alignment with Gap Costs set to Existence: 11 Extension: 1 where percent identity is calculated by dividing the number of identities by the length of the alignment, as further described in Altschul et al. (“Gapped BLAST and PSI-BLAST: a new generation of protein database search programs”, Nucleic Acids Res. 25:3389-3402, 1997) and Altschul et al, (“Protein database searches using compositionally adjusted substitution matrices”, FEBS J. 272:5101-5109, 2005).

[0065] A skilled person understands that amino acid (or nucleotide) positions may be determined in homologous sequences based on alignment, for example, “H840” in a reference Cas9 sequence may correspond to H839, or another position in a Cas9 homolog.

[0066] The term “polynucleotide” or “nucleic acid molecule” can be any polymeric form of nucleotides, including DNA, RNA, a hybridization thereof, or RNA-DNA chimeric molecules. In some embodiments, a polynucleotide comprises cDNA, genomic DNA, mRNA, tRNA, rRNA, or microRNA. In some embodiments, a polynucleotide is double stranded, e.g., a double-stranded DNA in a gene. In some embodiments, a polynucleotide is single-stranded or substantially single-stranded, e.g., single-stranded DNA or an mRNA. In some embodiments, a polynucleotide is a cell-free nucleic acid molecule. In some embodiments, a polynucleotide circulates in blood. In some embodiments, a polynucleotide is a cellular nucleic acid molecule. In some embodiments, a polynucleotide is a cellular nucleic acid molecule in a cell circulating in blood.

[0067] Polynucleotides can have any three-dimensional structure. The following are nonlimiting examples of polynucleotides: a gene or gene fragment (for example, a probe, primer, EST or SAGE tag), an exon, an intron, intergenic DNA (including, without limitation, heterochromatic DNA), messenger RNA (mRNA), transfer RNA (tRNA), ribosomal RNA (rRNA), a ribozyme, cDNA, a recombinant polynucleotide, a branched polynucleotide, a plasmid, a vector, isolated DNA, isolated RNA, sgRNA, guide RNA, a nucleic acid probe, a primer, an snRNA, a long non-coding RNA, a snoRNA, a siRNA, a miRNA, a tRNA-derived small RNA (tsRNA), an antisense RNA, an shRNA, or a small rDNA-derived RNA (srRNA).

[0068] In some embodiments, a polynucleotide comprises deoxyribonucleotides, ribonucleotides or analogs thereof. In some embodiments, a polynucleotide comprises modified nucleotides, such as methylated nucleotides and nucleotide analogs. If present, modifications to the nucleotide structure can be imparted before or after assembly of the polynucleotide. The sequence of nucleotides can be interrupted by non-nucleotide components. A polynucleotide can be further modified after polymerization, such as by conjugation with a labeling component.

[0069] In some embodiments, a polynucleotide is composed of a specific sequence of four nucleotide bases: adenine (A); cytosine (C); guanine (G); thymine (T); and uracil (U) for thymine when the polynucleotide is RNA. In some embodiments, the polynucleotide may comprise one or more other nucleotide bases, such as inosine (I), which is read by the translation machinery as guanine (G).

[0070] In some embodiments, a polynucleotide may be modified. As used herein, the terms “modified” or “modification” refers to chemical modification with respect to the A, C, G, T and U nucleotides, and is indicated as mA, mC, mG, mT, and mT. In some embodiments, modifications may be on the nucleoside base and/or sugar portion of the nucleosides that comprise the polynucleotide. In some embodiments, the modification may be on the internucleoside linkage (e.g., phosphate backbone). In some embodiments, multiple modifications are included in the modified nucleic acid molecule. In some embodiments, a single modification is included in the modified nucleic acid molecule.

[0071] The term “complement”, “complementary”, or “complementarity” as used herein, refers to the ability of two polynucleotide molecules to base pair with each other. Complementary polynucleotides may base pair via hydrogen bonding, which may be Watson Crick, Hoogsteen or reversed Hoogsteen hydrogen bonding. For example, an adenine on one polynucleotide molecule will base pair to a thymine or an uracil on a second polynucleotide molecule and a cytosine on one polynucleotide molecule will base pair to guanine on a second polynucleotide molecule. Two polynucleotide molecules are complementary to each other when a first polynucleotide molecule comprising a first nucleotide sequence can base pair with a second polynucleotide molecule comprising a second nucleotide sequence. For instance, the two DNA molecules 5′-ATGC-3′ and 5′-GCAT-3′ are complementary, and the complement of the DNA molecule 5′-ATGC-3′ is 5′-GCAT-3′. A percentage of complementarity indicates the percentage of nucleotides in a polynucleotide molecule which can base pair with a second polynucleotide molecule (e.g., 5, 6, 7, 8, 9, 10 out of 10 being 50%, 60%, 70%, 80%, 90%, and 100% complementary, respectively). “Perfectly complementary” means that all the contiguous nucleotides of a polynucleotide molecule will base pair with the same number of contiguous nucleotides in a second polynucleotide molecule. “Substantially complementary” as used herein refers to a degree of complementarity that can be 70%, 75%, 80%, 85%, 90%, 95%, 97%, 98%, or 99% over all or a portion of two polynucleotide molecules. In some embodiments, the portion of complementarity may be a region of 10, 15, 20, 25, 30, 35, 40, 45, 50, or more nucleotides. “Substantial complementary” can also refer to a 100% complementarity over a portion or a region of two polynucleotide molecules. In some embodiments, the portion or the region of complementarity between the two polynucleotide molecules is at least 60%, 65%, 70%, 75%, 80%, 85%, 90%, 95%, 97%, 98%, or 99% of the length of at least one of the two polynucleotide molecules or a functional or defined portion thereof.

[0072] As used herein, “expression” refers to the process by which polynucleotides are transcribed into mRNA and/or the process by which polynucleotides, e.g., the transcribed mRNA, translated into peptides, polypeptides, or proteins. If the polynucleotide is derived from genomic DNA, expression may include splicing of the mRNA in a eukaryotic cell. In some embodiments, expression of a polynucleotide, e.g., a gene or a DNA encoding a protein, is determined by the amount of the protein encoded by the gene after transcription and translation of the gene. In some embodiments, expression of a polynucleotide, e.g., a gene or a DNA encoding a protein, is determined by the amount of a functional form of the protein encoded by the gene after transcription and translation of the gene. In some embodiments, expression of a gene is determined by the amount of the mRNA, or transcript, that is encoded by the gene after transcription the gene. In some embodiments, expression of a polynucleotide, e.g., an mRNA, is determined by the amount of the protein encoded by the mRNA after translation of the mRNA. In some embodiments, expression of a polynucleotide, e.g., a mRNA or coding RNA, is determined by the amount of a functional form of the protein encoded by the polypeptide after translation of the polynucleotide.

[0073] The term “sequencing” as used herein, may comprise capillary sequencing, bisulfite-free sequencing, bisulfite sequencing, TET-assisted bisulfite (TAB) sequencing, ACE-sequencing, high-throughput sequencing, Maxam-Gilbert sequencing, massively parallel signature sequencing, Polony sequencing, 454 pyrosequencing, Sanger sequencing, Illumina sequencing, SOLiD sequencing, Ion Torrent semiconductor sequencing, DNA nanoball sequencing, Heliscope single molecule sequencing, single molecule real time (SMRT) sequencing, nanopore sequencing, shot gun sequencing, RNA sequencing, or any combination thereof.

[0074] The terms “equivalent” or “biological equivalent” are used interchangeably when referring to a particular molecule, or biological or cellular material, and means a molecule having minimal homology to another molecule while still maintaining a desired structure or functionality.

[0075] The term “encode” as it is applied to polynucleotides refers to a polynucleotide which is said to “encode” another polynucleotide, a polypeptide, or an amino acid if, in its native state or when manipulated by methods well known to those skilled in the art, it can be used as polynucleotide synthesis template, e.g., transcribed into an RNA, reverse transcribed into a DNA or cDNA, and/or translated to produce an amino acid, or a polypeptide or fragment thereof. In some embodiments, a polynucleotide comprising three contiguous nucleotides form a codon that encodes a specific amino acid. In some embodiments, a polynucleotide comprises one or more codons that encode a polypeptide. In some embodiments, a polynucleotide comprising one or more codons comprises a mutation in a codon compared to a wild-type reference polynucleotide. In some embodiments, the mutation in the codon encodes an amino acid substitution in a polypeptide encoded by the polynucleotide as compared to a wild-type reference polypeptide.

[0076] The term “mutation” as used herein refers to a change and/or alteration in an amino acid sequence of a protein or nucleic acid sequence of a polynucleotide. Such changes and/or alterations may comprise the substitution, insertion, deletion and/or truncation of one or more amino acids, in the case of an amino acid sequence, and/or nucleotides, in the case of nucleic acid sequence, compared to a reference amino acid or a reference nucleic acid sequence. In some embodiments, the reference sequence is a wild-type sequence. In some embodiments, a mutation in a nucleic acid sequence of a polynucleotide encodes a mutation in the amino acid sequence of a polypeptide. In some embodiments, the mutation in the amino acid sequence of the polypeptide or the mutation in the nucleic acid sequence of the polynucleotide is a mutation associated with a disease state.

[0077] The term “subject” and its grammatical equivalents as used herein may refer to a human or a non-human. A subject may be a mammal. A human subject may be male or female. A human subject may be of any age. A subject may be a human embryo. A human subject may be a newborn, an infant, a child, an adolescent, or an adult. A human subject may be in need of treatment for a genetic disease or disorder.

[0078] The terms “treatment” or “treating” and their grammatical equivalents may refer to the medical management of a subject with an intent to cure, ameliorate, or ameliorate a symptom of, a disease, condition, or disorder. Treatment may include active treatment, that is, treatment directed specifically toward the improvement of a disease, condition, or disorder. Treatment may include causal treatment, that is, treatment directed toward removal of the cause of the associated disease, condition, or disorder. In addition, this treatment may include palliative treatment, that is, treatment designed for the relief of symptoms rather than the curing of the disease, condition, or disorder. Treatment may include supportive treatment, that is, treatment employed to supplement another specific therapy directed toward the improvement of the disease, condition, or disorder. In some embodiments, a condition may be pathological. In some embodiments, a treatment may not completely cure or prevent a disease, condition, or disorder. In some embodiments, a treatment ameliorates, but does not completely cure or prevent a disease, condition, or disorder. In some embodiments, a subject may be treated for 12 hours, 24 hours, 2 days, 3 days, 4 days, 5 days, 6 days, 7 days, 2 weeks, 3 weeks, 4 weeks, 2 months, 3 months, 4 months, 5 months, 6 months, 1 year, 2 years, 3 years, 4 years, 5 years, 6 years, indefinitely, or life of the subject.

[0079] The term “ameliorate” and its grammatical equivalents means to decrease, suppress, attenuate, diminish, arrest, or stabilize the development or progression of a disease.

[0080] The terms “prevent” or “preventing” means delaying, forestalling, or avoiding the onset or development of a disease, condition, or disorder for a period of time. Prevent also means reducing risk of developing a disease, disorder, or condition. Prevention includes minimizing or partially or completely inhibiting the development of a disease, condition, or disorder. In some embodiments, a composition, e.g., a pharmaceutical composition, prevents a disorder by delaying the onset of the disorder for 12 hours, 24 hours, 2 days, 3 days, 4 days, 5 days, 6 days, 7 days, 2 weeks, 3 weeks, 4 weeks, 2 months, 3 months, 4 months, 5 months, 6 months, 1 year, 2 years, 3 years, 4 years, 5 years, 6 years, indefinitely, or life of a subject.

[0081] The term “effective amount” or “therapeutically effective amount” refers to a quantity of a composition, for example a prime editing composition comprising a construct, that can be sufficient to result in a desired activity upon introduction into a subject as disclosed herein. An effective amount of the prime editing compositions can be provided to the target gene or cell, whether the cell is ex vivo or in vivo.

[0082] An effective amount can be the amount to induce, for example, at least about a 2-fold change (increase or decrease) or more in the amount of target nucleic acid modulation (e.g., expression of RHO gene to produce functional rhodopsin (RHO) protein) observed relative to a negative control. An effective amount or dose can induce, for example, about 2-fold increase, about 3-fold increase, about 4-fold increase, about 5-fold increase, about 6-fold increase, about 7-fold increase, about 8-fold increase, about 9-fold increase, about 10-fold increase, about 25-fold increase, about 50-fold increase, about 100-fold increase, about 200-fold increase, about 500-fold increase, about 700-fold increase, about 1000-fold increase, about 5000-fold increase, or about 10,000-fold increase in target gene modulation (e.g., expression of a target RHO gene to produce functional rhodopsin).

[0083] The amount of target gene modulation may be measured by any suitable method known in the art. In some embodiments, the “effective amount” or “therapeutically effective amount” is the amount of a composition that is required to ameliorate the symptoms of a disease relative to an untreated patient. In some embodiments, an effective amount is the amount of a composition sufficient to introduce an alteration in a gene of interest in a cell (e.g., a cell in vitro or in vivo).

[0084] In some embodiments, an effective amount can be an amount to induce, when administered to a population of cells, a certain percentage of the population of cells to have a correction of the P23H mutation. For example, in some embodiments, an effective amount can be the amount to induce, when administered to or introduced to a population of cells, installation of one or more intended nucleotide edits that correct a c.68 C→A (encoding P23H amino acid substitution) mutation in the RHO gene, in at least about 1%, 2%, 5%, about 10%, about 15%, about 20%, about 25%, about 30%, about 35%, about 40%, about 45%, about 50%, about 55%, about 60%, about 65%, about 70%, about 75%, about 80%, about 85%, about 90%, about 95%, or about 99% of the population of cells.

### Prime Editing

[0085] The term “prime editing” refers to programmable editing of a target DNA using a prime editor complexed with a PEgRNA to incorporate an intended nucleotide edit (also referred to herein as a nucleotide change) into the target DNA through target-primed DNA synthesis. A target gene of prime editing may comprise a double stranded DNA molecule having two complementary strands: a first strand that may be referred to as a “target strand” or a “non-edit strand”, and a second strand that may be referred to as a “non-target strand,” or an “edit strand.” In some embodiments, in a prime editing guide RNA (PEgRNA), a spacer sequence is complementary or substantially complementary to a specific sequence on the target strand, which may be referred to as a “search target sequence”. In some embodiments, the spacer sequence anneals with the target strand at the search target sequence. The target strand may also be referred to as the “non-Protospacer Adjacent Motif (non-PAM strand).” In some embodiments, the non-target strand may also be referred to as the “PAM strand”. In some embodiments, the PAM strand comprises a protospacer sequence and optionally a protospacer adjacent motif (PAM) sequence. In prime editing using a Cas-protein-based prime editor, a PAM sequence refers to a short DNA sequence immediately adjacent to the protospacer sequence on the PAM strand of the target gene. A PAM sequence may be specifically recognized by a programmable DNA binding protein, e.g., a Cas nickase or a Cas nuclease. In some embodiments, a specific PAM is characteristic of a specific programmable DNA binding protein, e.g., a Cas nickase or a Cas nuclease A protospacer sequence refers to a specific sequence in the PAM strand of the target gene that is complementary to the search target sequence. In a PEgRNA, a spacer sequence may have a substantially identical sequence as the protospacer sequence on the edit strand of a target gene, except that the spacer sequence may comprise Uracil (U) and the protospacer sequence may comprise Thymine (T).

[0086] In some embodiments, the double stranded target DNA comprises a nick site on the PAM strand (or non-target strand). As used herein, a “nick site” refers to a specific position in between two nucleotides or two base pairs of the double stranded target DNA. In some embodiments, the position of a nick site is determined relative to the position of a specific PAM sequence. In some embodiments, the nick site is the particular position where a nick will occur when the double stranded target DNA is contacted with a nickase, for example, a Cas nickase, that recognizes a specific PAM sequence. In some embodiments, the nick site is upstream of a specific PAM sequence on the PAM strand of the double stranded target DNA. In some embodiments, the nick site is downstream of a specific PAM sequence on the PAM strand of the double stranded target DNA. In some embodiments, the nick site is upstream of a PAM sequence recognized by a Cas9 nickase, wherein the Cas9 nickase comprises a nuclease active RuvC domain and a nuclease inactive HNH domain. In some embodiments, the nick site is 3 nucleotides upstream of the PAM sequence, and the PAM sequence is recognized by a Streptococcus pyogenes Cas9 nickase, a P. lavamentivorans Cas9 nickase, a C. diphtheriae Cas9 nickase, a N. cinerea Cas9, a S. aureus Cas9, or a N. lari Cas9 nickase. In some embodiments, the nick site is 3 base pairs upstream of the PAM sequence, and the PAM sequence is recognized by a Cas9 nickase, wherein the Cas9 nickase that comprises a nuclease active RuvC domain and a nuclease inactive HNH domain. In some embodiments, the nick site is 2 nucleotides upstream of the PAM sequence, and the PAM sequence is recognized by a S. thermophilus Cas9 nickase that comprises a nuclease active RuvC domain and a nuclease inactive HNH domain.

[0087] A “primer binding site” (also referred to as PBS or primer binding site sequence) is a single-stranded portion of the PEgRNA that comprises a region of complementarity to the PAM strand (i.e. the non-target strand or the edit strand). The PBS is complementary or substantially complementary to a sequence on the PAM strand of the double stranded target DNA that is immediately upstream of the nick site. In some embodiments, in the process of prime editing, the PEgRNA complexes with and directs a prime editor to bind the search target sequence on the target strand of the double stranded target DNA, and generates a nick at the nick site on the non-target strand of the double stranded target DNA. In some embodiments, the PBS is complementary to or substantially complementary to, and can anneal to, a free 3′ end on the non-target strand of the double stranded target DNA at the nick site. In some embodiments, the PBS annealed to the free 3′ end on the non-target strand can initiate target-primed DNA synthesis.

[0088] An “editing template” of a PEgRNA is a single-stranded portion of the PEgRNA that is 5′ of the PBS and which encodes a single strand of DNA. The editing template may comprise a region of complementarity to the PAM strand (i.e., the non-target strand or the edit strand), and comprises one or more intended nucleotide edits compared to the endogenous sequence of the double stranded target DNA. In some embodiments, the editing template and the PBS are immediately adjacent to each other. Accordingly, in some embodiments, a PEgRNA in prime editing comprises a single-stranded portion that comprises the PBS and the editing template immediately adjacent to each other. In some embodiments, the single stranded portion of the PEgRNA comprising both the PBS and the editing template is complementary or substantially complementary to an endogenous sequence on the PAM strand (i.e., the non-target strand or the edit strand) of the double stranded target DNA except for one or more non-complementary nucleotides at the intended nucleotide edit position(s). As used herein, regardless of relative 5′-3′ positioning in other context, the relative positions as between the PBS and the editing template, and the relative positions as among elements of a PEgRNA, are determined by the 5′ to 3′ order of the PEgRNA as a single molecule regardless of the position of sequences in the double stranded target DNA that may have complementarity or identity to elements of the PEgRNA. In some embodiments, the editing template is complementary or substantially complementary to a sequence on the PAM strand that is immediately downstream of the nick site, except for one or more non-complementary nucleotides at the intended nucleotide edit positions. The endogenous, e.g., genomic, sequence that is complementary or substantially complementary to the editing template, except for the one or more non-complementary nucleotides at the position corresponding to the intended nucleotide edit, may be referred to as an “editing target sequence”. In some embodiments, the editing template has identity or substantial identity to a sequence on the target strand that is complementary to, or having the same position in the genome as, the editing target sequence, except for one or more insertions, deletions, or substitutions at the intended nucleotide edit positions. In some embodiments, the editing template encodes a single stranded DNA, wherein the single stranded DNA has identity or substantial identity to the editing target sequence except for one or more insertions, deletions, or substitutions at the positions of the one or more intended nucleotide edits. In some embodiments, the editing template may encode the wild-type or non-disease associated gene sequence (or its complement if the edit strand is the antisense strand of a gene). In some embodiments, the editing template may encode the wild-type or non-disease associated protein, but contain one or more synonymous mutations relative to the wild-type or non-disease associated protein coding region. Such synonymous mutations may include, for example, mutations that decrease the ability of a PEgRNA to rebind to the same target sequence once the desired edit is installed in the genome (e.g., synonymous mutations that silence the endogenous PAM sequence or that edit the endogenous protospacer).

[0089] In some embodiments, a PEgRNA complexes with and directs a prime editor to bind to the search target sequence of the target gene. In some embodiments, the bound prime editor generates a nick on the edit strand (PAM strand) of the target gene at the nick site. In some embodiments, a primer binding site (PBS) of the PEgRNA anneals with a free 3′ end formed at the nick site, and the prime editor initiates DNA synthesis from the nick site, using the free 3′ end as a primer. Subsequently, a single-stranded DNA encoded by the editing template of the PEgRNA is synthesized. In some embodiments, the newly synthesized single-stranded DNA comprises one or more intended nucleotide edits compared to the endogenous target gene sequence. Accordingly, in some embodiments, the editing template of a PEgRNA is complementary to a sequence in the edit strand except for one or more mismatches at the intended nucleotide edit positions in the editing template. The endogenous, e.g., genomic, sequence that is partially complementary to the editing template may be referred to as an “editing target sequence”. Accordingly, in some embodiments, the newly synthesized single stranded DNA has identity or substantial identity to a sequence in the editing target sequence, except for one or more insertions, deletions, or substitutions at the intended nucleotide edit positions. In some embodiments, the editing template comprises at least 4 contiguous nucleotides of complementarity with the edit strand wherein the at least 4 nucleotides contiguous are located upstream of the Y most edit in the editing template.

[0090] In some embodiments, the newly synthesized single-stranded DNA equilibrates with the editing target on the edit strand of the target gene for pairing with the target strand of the target gene. In some embodiments, the editing target sequence of the target gene is excised by a flap endonuclease (FEN), for example, FEN1. In some embodiments, the FEN is an endogenous FEN, for example, in a cell comprising the target gene. In some embodiments, the FEN is provided as part of the prime editor, either linked to other components of the prime editor or provided in trans. In some embodiments, the newly synthesized single stranded DNA, which comprises the intended nucleotide edit, replaces the endogenous single stranded editing target sequence on the edit strand of the target gene. In some embodiments, the newly synthesized single stranded DNA and the endogenous DNA on the target strand form a heteroduplex DNA structure at the region corresponding to the editing target sequence of the target gene. In some embodiments, the newly synthesized single-stranded DNA comprising the nucleotide edit is paired in the heteroduplex with the target strand of the target DNA that does not comprise the nucleotide edit, thereby creating a mismatch between the two otherwise complementary strands. In some embodiments, the mismatch is recognized by DNA repair machinery, e.g., an endogenous DNA repair machinery. In some embodiments, through DNA repair, the intended nucleotide edit is incorporated into the target gene.

### Prime Editor

[0091] The term “prime editor (PE)” refers to the polypeptide or polypeptide components involved in prime editing, or any polynucleotide(s) encoding the polypeptide or polypeptide components. In various embodiments, a prime editor includes a polypeptide domain having DNA binding activity and a polypeptide domain having DNA polymerase activity. In some embodiments, the prime editor further comprises a polypeptide domain having nuclease activity. In some embodiments, the polypeptide domain having DNA binding activity comprises a nuclease domain or nuclease activity. In some embodiments, the polypeptide domain having nuclease activity comprises a nickase, or a fully active nuclease. As used herein, the term “nickase” refers to a nuclease capable of cleaving only one strand of a double-stranded DNA target. In some embodiments, the prime editor comprises a polypeptide domain that is an inactive nuclease. In some embodiments, the polypeptide domain having programmable DNA binding activity comprises a nucleic acid guided DNA binding domain, for example, a CRISPR-Cas protein, for example, a Cas9 nickase, a Cpf1 nickase, or another CRISPR-Cas nuclease. In some embodiments, the polypeptide domain having DNA polymerase activity comprises a template-dependent DNA polymerase, for example, a DNA-dependent DNA polymerase or an RNA-dependent DNA polymerase. In some embodiments, the DNA polymerase is a reverse transcriptase. In some embodiments, the prime editor comprises additional polypeptides involved in prime editing, for example, a polypeptide domain having 5′ endonuclease activity, e.g., a 5′ endogenous DNA flap endonucleases (e.g., FEN1), for helping to drive the prime editing process towards the edited product formation. In some embodiments, the prime editor further comprises an RNA-protein recruitment polypeptide, for example, a MS2 coat protein.

[0092] A prime editor may be engineered. In some embodiments, the polypeptide components of a prime editor do not naturally occur in the same organism or cellular environment. In some embodiments, the polypeptide components of a prime editor may be of different origins or from different organisms. In some embodiments, a prime editor comprises a DNA binding domain and a DNA polymerase domain that are derived from different species. In some embodiments, a prime editor comprises a Cas polypeptide (DNA binding domain) and a reverse transcriptase polypeptide (DNA polymerase) that are derived from different species. For example, a prime editor may comprise a S. pyogenes Cas9 polypeptide and a Moloney murine leukemia virus (M-MLV) reverse transcriptase polypeptide.

[0093] In some embodiments, polypeptide domains of a prime editor may be fused or linked by a peptide linker to form a fusion protein. In other embodiments, a prime editor comprises one or more polypeptide domains provided in trans as separate proteins, which are capable of being associated to each other through non-peptide linkages or through aptamers or recruitment sequences. For example, a prime editor may comprise a DNA binding domain and a reverse transcriptase domain associated with each other by an RNA-protein recruitment aptamer, e.g., a MS2 aptamer, which may be linked to a PEgRNA. Prime editor polypeptide components may be encoded by one or more polynucleotides in whole or in part. In some embodiments, a single polynucleotide, construct, or vector encodes the prime editor fusion protein. In some embodiments, multiple polynucleotides, constructs, or vectors each encode a polypeptide domain or portion of a domain of a prime editor, or a portion of a prime editor fusion protein. For example, a prime editor fusion protein may comprise an N-terminal portion fused to an intein-N and a C-terminal portion fused to an intein-C, each of which is individually encoded by an AAV vector.

### Prime Editor Nucleotide Polymerase Domain

[0094] In some embodiments, a prime editor comprises a nucleotide polymerase domain, e.g., a DNA polymerase domain. The DNA polymerase domain may be a wild-type DNA polymerase domain, a full-length DNA polymerase protein domain, or may be a functional mutant, a functional variant, or a functional fragment thereof. In some embodiments, the polymerase domain is a template dependent polymerase domain. For example, the DNA polymerase may rely on a template polynucleotide strand, e.g., the editing template sequence, for new strand DNA synthesis. In some embodiments, the prime editor comprises a DNA-dependent DNA polymerase. For example, a prime editor having a DNA-dependent DNA polymerase can synthesize a new single stranded DNA using a PEgRNA editing template that comprises a DNA sequence as a template. In such cases, the PEgRNA is a chimeric or hybrid PEgRNA, and comprising an extension arm comprising a DNA strand. The chimeric or hybrid PEgRNA may comprise an RNA portion (including the spacer and the gRNA core) and a DNA portion (the extension arm comprising the editing template that includes a strand of DNA).

[0095] In some embodiments, the DNA polymerases can be wild type polymerases from eukaryotic, prokaryotic, archaeal, or viral organisms, and/or the polymerases may be modified by genetic engineering, mutagenesis, or directed evolution-based processes. The polymerases can be a T7 DNA polymerase, T5 DNA polymerase, T4 DNA polymerase, Klenow fragment DNA polymerase, DNA polymerase III and the like. The polymerases can be thermostable, and can include Taq, Tne, Tma, Pfu, Tfl, Tth, Stoffel fragment, VENT® and DEEPVENT® DNA polymerases, KOD, Tgo, JDF3, and mutants, variants and derivatives thereof.

[0096] In some embodiments, the DNA polymerase is a bacteriophage polymerase, for example, a T4, T7, or phi29 DNA polymerase. In some embodiments, the DNA polymerase is an archaeal polymerase, for example, pol I type archaeal polymerase or a pol II type archaeal polymerase. In some embodiments, the DNA polymerase comprises a thermostable archaeal DNA polymerase. In some embodiments, the DNA polymerase comprises a eubacterial DNA polymerase, for example, Pol I, Pol II, or Pol III polymerase. In some embodiments, the DNA polymerase is a Pol I family DNA polymerase. In some embodiments, the DNA polymerase is a E. coli Pol I DNA polymerase. In some embodiments, the DNA polymerase is a Pol II family DNA polymerase. In some embodiments, the DNA polymerase is a Pyrococcus furiosus (Pfu) Pol II DNA polymerase. In some embodiments, the DNA Polymerase is a Pol IV family DNA polymerase. In some embodiments, the DNA polymerase is a E. coli Pol IV DNA polymerase.

[0097] In some embodiments, the DNA polymerase comprises a eukaryotic DNA polymerase. In some embodiments, the DNA polymerase is a Pol-beta DNA polymerase, a Pol-lambda DNA polymerase, a Pol-sigma DNA polymerase, or a Pol-mu DNA polymerase. In some embodiments, the DNA polymerase is a Pol-alpha DNA polymerase. In some embodiments, the DNA polymerase is a POLA1 DNA polymerase. In some embodiments, the DNA polymerase is a POLA2 DNA polymerase. In some embodiments, the DNA polymerase is a Pol-delta DNA polymerase. In some embodiments, the DNA polymerase is a POLD1 DNA polymerase. In some embodiments, the DNA polymerase is a POLD2 DNA polymerase. In some embodiments, the DNA polymerase is a human POLD1 DNA polymerase. In some embodiments, the DNA polymerase is a human POLD2 DNA polymerase. In some embodiments, the DNA polymerase is a POLD3 DNA polymerase. In some embodiments, the DNA polymerase is a POLD4 DNA polymerase. In some embodiments, the DNA polymerase is a Pol-epsilon DNA polymerase. In some embodiments, the DNA polymerase is a POLE1 DNA polymerase. In some embodiments, the DNA polymerase is a POLE2 DNA polymerase. In some embodiments, the DNA polymerase is a POLE3 DNA polymerase. In some embodiments, the DNA polymerase is a Pol-eta (POLH) DNA polymerase. In some embodiments, the DNA polymerase is a Pol-iota (POLI) DNA polymerase. In some embodiments, the DNA polymerase is a Pol-kappa (POLK) DNA polymerase. In some embodiments, the DNA polymerase is a RevI DNA polymerase. In some embodiments, the DNA polymerase is a human RevI DNA polymerase. In some embodiments, the DNA polymerase is a viral DNA-dependent DNA polymerase. In some embodiments, the DNA polymerase is a B family DNA polymerases. In some embodiments, the DNA polymerase is a herpes simplex virus (HSV) UL30 DNA polymerase. In some embodiments, the DNA polymerase is a cytomegalovirus (CMV) UL54 DNA polymerase.

[0098] In some embodiments, the DNA polymerase is an archaeal polymerase. In some embodiments, the DNA polymerase is a Family B/pol I type DNA polymerase. For example, in some embodiments, the DNA polymerase is a homolog of Pfu from Pyrococcus furiosus. In some embodiments, the DNA polymerase is a pol II type DNA polymerase. For example, in some embodiments, the DNA polymerase is a homolog of P. furiosus DP1/DP2 2-subunit polymerase. In some embodiments, the DNA polymerase lacks 5′ to 3′ nuclease activity. Suitable DNA polymerases (pol I or pol II) can be derived from archaea with optimal growth temperatures that are similar to the desired assay temperatures.

[0099] In some embodiments, the DNA polymerase comprises a thermostable archaeal DNA polymerase. In some embodiments, the thermostable DNA polymerase is isolated or derived from Pyrococcus species (furiosus, species GB-D, woesii, abysii, horikoshii), Thermococcus species (kodakarensis KOD1, litoralis, species 9 degrees North-7, species JDF-3, gorgonarius), Pyrodictium occultum, and Archaeoglobus fulgidus.

[0100] Polymerases may also be from eubacterial species. In some embodiments, the DNA polymerase is a Pol I family DNA polymerase. In some embodiments, the DNA polymerase is an E. coli Pol I DNA polymerase. In some embodiments, the DNA polymerase is a Pol II family DNA polymerase. In some embodiments, the DNA polymerase is a Pyrococcus furiosus (Pfu) Pol II DNA polymerase. In some embodiments, the DNA Polymerase is a Pol III family DNA polymerase. In some embodiments, the DNA Polymerase is a Pol IV family DNA polymerase. In some embodiments, the DNA polymerase is an E. coli Pol IV DNA polymerase. In some embodiments, the Pol I DNA polymerase is a DNA polymerase functional variant that lacks or has reduced 5′ to 3′ exonuclease activity.

[0101] Suitable thermostable pol I DNA polymerases can be isolated from a variety of thermophilic eubacteria, including Thermus species and Thermotoga maritima such as Thermus aquaticus (Taq), Thermus thermophilus (Tth) and Thermotoga maritima (Tma UlTma).

[0102] In some embodiments, a prime editor comprises an RNA-dependent DNA polymerase domain, for example, a reverse transcriptase (RT). A RT or an RT domain may be a wild type RT domain, a full-length RT domain, or may be a functional mutant, a functional variant, or a functional fragment thereof. An RT or an RT domain of a prime editor may comprise a wild-type RT, or may be engineered or evolved to contain specific amino acid substitutions, truncations, or variants. An engineered RT may comprise sequences or amino acid changes different from a naturally occurring RT. In some embodiments, the engineered RT may have improved reverse transcription activity over a naturally occurring RT or RT domain. In some embodiments, the engineered RT may have improved features over a naturally occurring RT, for example, improved thermostability, reverse transcription efficiency, or target fidelity. In some embodiments, a prime editor comprising the engineered RT has improved prime editing efficiency over a prime editor having a reference naturally occurring RT.

[0103] In some embodiments, a prime editor comprises a virus RT, for example, a retrovirus RT. Non-limiting examples of virus RT include Moloney murine leukemia virus (M-MLV, MMLVRT or M-MLV RT); human T-cell leukemia virus type 1 (HTLV-1) RT; bovine leukemia virus (BLV) RT; Rous Sarcoma Virus (RSV) RT; human immunodeficiency virus (HIV) RT, M-MFV RT, Avian Sarcoma-Leukosis Virus (ASLV) RT, Rous Sarcoma Virus (RSV) RT, Avian Myeloblastosis Virus (AMV) RT, Avian Erythroblastosis Virus (AEV) Helper Virus MCAV RT, Avian Myelocytomatosis Virus MC29 Helper Virus MCAV RT, Avian Reticuloendotheliosis Virus (REV-T) Helper Virus REV-A RT, Avian Sarcoma Virus UR2 Helper Virus (UR2AV) RT, Avian Sarcoma Virus Y73 Helper Virus YAV RT, Rous Associated Virus (RAV) RT, and Myeloblastosis Associated Virus (MAV) RT, all of which may be suitably used in the methods and composition described herein.

[0104] In some embodiments, the prime editor comprises a wild type M-MLV RT, a functional mutant, a functional variant, or a functional fragment thereof.

[0105] In some embodiments, the prime editor comprises a reference M-MLV RT, a functional mutant, a functional variant, or a functional fragment thereof. In some embodiments, the RT domain or a RT is a M-MLV RT (e.g., wild-type M-MLV RT, a functional mutant, a functional variant, or a functional fragment thereof). In some embodiments, the RT domain or a RT is a M-MLV RT (e.g., a reference M-MLV RT, a functional mutant, a functional variant, or a functional fragment thereof). In some embodiments, a M-MLV RT, e.g., reference M-MLV RT, comprises an amino acid sequence as set forth in any one of SEQ ID NO: 1863.

[0106] In some embodiments, a reference M-MLV RT is a wild-type M-MLV RT. An exemplary amino acid sequence of a reference M-MLV RT is provided in SEQ ID NO: 1862.

[0107] In some embodiments, the prime editor comprises a wild type M-MLV RT. An exemplary amino acid sequence of a wild type M-MLV RT is provided in SEQ ID NO: 1862.

(SEQ ID NO: 1862)
TLNIEDEHRLHETSKEPDVSLGSTWLSDFPQAWAETGGMGLAVRQAPLIIPLKATSTP
VSIKQYPMSQEARLGIKPHIQRLLDQGILVPCQSPWNTPLLPVKKPGTNDYRPVQDLREVNKR
VEDIHPTVPNPYNLLSGLPPSHQWYTVLDLKDAFFCLRLHPTSQPLFAFEWRDPEMGISGQLT
WTRLPQGFKNSPTLFDEALHRDLADFRIQHPDLILLQYVDDLLLAATSELDCQQGTRALLQTL
GNLGYRASAKKAQICQKQVKYLGYLLKEGQRWLTEARKETVMGQPTPKTPRQLREFLGTA
GFCRLWIPGFAEMAAPLYPLTKTGTLFNWGPDQQKAYQEIKQALLTAPALGLPDLTKPFELF
VDEKQGYAKGVLTQKLGPWRRPVAYLSKKLDPVAAGWPPCLRMVAAIAVLTKDAGKLTM
GQPLVILAPHAVEALVKQPPDRWLSNARMTHYQALLLDTDRVQFGPVVALNPATLLPLPEE
GLQHNCLDILAEAHGTRPDLTDQPLPDADHTWYTDGSSLLQEGQRKAGAAVTTETEVIWAK
ALPAGTSAQRAELIALTQALKMAEGKKLNVYTDSRYAFATAHIHGEIYRRRGLLTSEGKEIK
NKDEILALLKALFLPKRLSIIHCPGHQKGHSAEARGNRMADQAARKAAITETPDTSTLLIENSS
P.

[0108] In some embodiments, the prime editor comprises a reference M-MLV RT. An exemplary amino acid sequence of a reference M-MLV RT is provided in SEQ ID NO: 1863.

(SEQ ID NO: 1863)
TLNIEDEYRLHETSKEPDVSLGSTWLSDFPQAWAETGGMGLAVRQAPLIIPLKATSTP
VSIKQYPMSQEARLGIKPHIQRLLDQGILVPCQSPWNTPLLPVKKPGTNDYRPVQDLREVNKR
VEDIHPTVPNPYNLLSGLPPSHQWYTVLDLKDAFFCLRLHPTSQPLFAFEWRDPEMGISGQLT
WTRLPQGFKNSPTLFDEALHRDLADFRIQHPDLILLQYVDDLLLAATSELDCQQGTRALLQTL
GNLGYRASAKKAQICQKQVKYLGYLLKEGQRWLTEARKETVMGQPTPKTPRQLREFLGTA
GFCRLWIPGFAEMAAPLYPLTKTGTLFNWGPDQQKAYQEIKQALLTAPALGLPDLTKPFELF
VDEKQGYAKGVLTQKLGPWRRPVAYLSKKLDPVAAGWPPCLRMVAAIAVLTKDAGKLTM
GQPLVILAPHAVEALVKQPPDRWLSNARMTHYQALLLDTDRVQFGPVVALNPATLLPLPEE
GLQHNCLDILAEAHGTRPDLTDQPLPDADHTWYTDGSSLLQEGQRKAGAAVTTETEVIWAK
ALPAGTSAQRAELIALTQALKMAEGKKLNVYTDSRYAFATAHIHGEIYRRRGLLTSEGKEIK
NKDEILALLKALFLPKRLSIIHCPGHQKGHSAEARGNRMADQAARKAAITETPDTSTLLIENSS
P.

[0109] In some embodiments, the prime editor comprises a M-MLV RT comprising one or more of amino acid substitutions P51X, S67X, E69X, L139X, T197X, D200X, H204X, F209X, E302X, T306X, F309X, W313X, T330X, L345X, L435X, N454X, D524X, E562X, D583X, H594X, L603X, E607X, or D653X as compared to the reference M-MLV RT as set forth in SEQ ID NO: 1863, where X is any amino acid other than the original amino acid in the reference M-MLV RT. In some embodiments, the prime editor comprises a M-MLV RT comprising one or more of amino acid substitutions P51L, S67K, E69K, L139P, T197A, D200N, H204R, F209N, E302K, E302R, T306K, F309N, W313F, T330P, L345G, L435G, N454K, D524G, E562Q, D583N, H594Q, L603W, E607K, and D653N as compared to the reference M-MLV RT as set forth in SEQ ID NO: 1863. In some embodiments, the prime editor comprises a M-MLV RT comprising one or more of amino acid substitutions D200N, T330P, L603W, T306K, and W313F as compared to the reference M-MLV RT as set forth in SEQ ID NO: 1863. In some embodiments, the prime editor comprises a M-MLV RT comprising amino acid substitutions D200N, T330P, L603W, T306K, and W313F as compared to the wild type M-MMLV RT as set forth in SEQ ID NO: 1863. In some embodiments, a prime editor comprising the D200N, T330P, L603W, T306K, and W313F as compared to a reference M-MLV RT as set forth in SEQ ID NO: 1863. In some embodiments, the prime editor comprises a M-MLV RT comprising one or more of amino acid substitutions D200N, T330P, L603W, T306K, and W313F as compared to a wild type M-MMLV RT as set forth in SEQ ID NO: 1862. In some embodiments, a prime editor may comprise amino acid substitutions D200N, T330P, L603W, T306K, and W313F as compared to a reference M-MLV RT as set forth in SEQ ID NO: 1863. In some embodiments, the prime editor comprises a M-MLV RT that comprises an amino acid sequence that is at least 70%, at least 75%, at least 80%, at least 85%, at least 90%, at least 95%, at least 96%, at least 97%, at least 98%, at least 99%, at least 99.5%, or at least 99.9% identical to an amino acid sequence set forth in any one of SEQ ID NOs: 1862, 1863, or 1864. In some embodiments, the prime editor comprises a M-MLV RT that comprises an amino acid sequence that is selected from the group consisting of SEQ ID NOs: 1862, 1863, and 1864 or a variant or fragment thereof. In some embodiments, the prime editor comprises a M-MLV RT that comprises an amino acid sequence set forth in SEQ ID NO: 1864.

(SEQ ID NO: 1864)
TLNIEDEYRLHETSKEPDVSLGSTWLSDFPQAWAETGGMGLAVRQAPLIIPLKATSTPVSIKQ
YPMSQEARLGIKPHIQRLLDQGILVPCQSPWNTPLLPVKKPGTNDYRPVQDLREVNKRVEDIH
PTVPNPYNLLSGLPPSHQWYTVLDLKDAFFCLRLHPTSQPLFAFEWRDPEMGISGQLTWTRLP
QGFKNSPTLFNEALHRDLADFRIQHPDLILLQYVDDLLLAATSELDCQQGTRALLQTLGNLG
YRASAKKAQICQKQVKYLGYLLKEGQRWLTEARKETVMGQPTPKTPRQLREFLGKAGFCRL
FIPGFAEMAAPLYPLTKPGTLFNWGPDQQKAYQEIKQALLTAPALGLPDLTKPFELFVDEKQ
GYAKGVLTQKLGPWRRPVAYLSKKLDPVAAGWPPCLRMVAAIAVLTKDAGKLTMGQPLVI
LAPHAVEALVKQPPDRWLSNARMTHYQALLLDTDRVQFGPVVALNPATLLPLPEEGLQHNC
LDILAEAHGTRPDLTDQPLPDADHTWYTDGSSLLQEGQRKAGAAVTTETEVIWAKALPAGT
SAQRAELIALTQALKMAEGKKLNVYTDSRYAFATAHIHGEIYRRRGWLTSEGKEIKNKDEIL
ALLKALFLPKRLSIIHCPGHQKGHSAEARGNRMADQAARKAAITETPDTSTLLIENSSP.

[0110] In some embodiments, an RT variant may be a functional fragment of a reference RT that has 1, 2, 3, 4, 5, 6, 7, 8, 9, 10, 11, 12, 13, 14, 15, 16, 17, 18, 19, 20, 21, 22, 21, 24, 25, 26, 27, 28, 29, 30, 31, 32, 33, 34, 35, 36, 37, 38, 39, 40, 41, 42, 43, 44, 45, 46, 47, 48, 49, 50, or up to 100, or up to 200, or up to 300, or up to 400, or up to 500 or more amino acid changes compared to a wild type RT, e.g., SEQ ID NO: 1862. In some embodiments, the RT variant comprises a fragment of a wild type RT, e.g., SEQ ID NO: 1862, such that the fragment is about 70% identical, about 80% identical, about 90% identical, about 95% identical, about 96% identical, about 97% identical, about 98% identical, about 99% identical, about 99.5% identical, or about 99.9% identical to the corresponding fragment of the wild type RT, e.g., SEQ ID NO: 1862. In some embodiments, the fragment is 30%, 35%, 40%, 45%, 50%, 55%, 60%, 65%, 70%, 75%, 80%, 85%, 90%, 95% identical, 96%, 97%, 98%, 99%, or 99.5% of the amino acid length of a corresponding wild type RT (M-MLV reverse transcriptase) (e.g., SEQ ID NO: 1862).

[0111] In some embodiments, an RT variant may be a functional fragment of a reference RT that has 1, 2, 3, 4, 5, 6, 7, 8, 9, 10, 11, 12, 13, 14, 15, 16, 17, 18, 19, 20, 21, 22, 21, 24, 25, 26, 27, 28, 29, 30, 31, 32, 33, 34, 35, 36, 37, 38, 39, 40, 41, 42, 43, 44, 45, 46, 47, 48, 49, 50, or up to 100, or up to 200, or up to 300, or up to 400, or up to 500 or more amino acid changes compared to a reference RT, e.g., SEQ ID NO: 1863. In some embodiments, the RT variant comprises a fragment of a reference RT, such that the fragment is about 70% identical, about 80% identical, about 90% identical, about 95% identical, about 96% identical, about 97% identical, about 98% identical, about 99% identical, about 99.5% identical, or about 99.9% identical to the corresponding fragment of a reference RT, e.g., SEQ ID NO: 1863. In some embodiments, the fragment is 30%, 35%, 40%, 45%, 50%, 55%, 60%, 65%, 70%, 75%, 80%, 85%, 90%, 95% identical, 96%, 97%, 98%, 99%, or 99.5% of the amino acid length of a reference RT, e.g., a M-MLV RT, e.g., SEQ ID NO: 1863.

[0112] In some embodiments, the RT functional fragment is at least 100 amino acids in length. In some embodiments, the fragment is at least 100, 150, 200, 250, 300, 350, 400, 450, 500, 550, or up to 600 or more amino acids in length.

[0113] In still other embodiments, the functional RT variant is truncated at the N-terminus or the C-terminus, or both, by a certain number of amino acids which results in a truncated variant which still retains sufficient DNA polymerase function. In some embodiments, the functional RT variant, e.g., a functional MMLV RT variant, is truncated at the C-terminus to abolish or reduce RNAase H activity and still retain DNA polymerase activity.

[0114] In some embodiments, a prime editing composition or a prime editing system disclosed herein comprises a polynucleotide (e.g., a DNA, a RNA, e.g., a mRNA) that encodes a M-MLV RT. In some embodiments, the polynucleotide encodes a M-MLV RT that comprises an amino acid sequence that is at least 70%, at least 75%, at least 80%, at least 85%, at least 90%, at least 95%, at least 96%, at least 97%, at least 98%, at least 99%, at least 99.5%, or at least 99.9% identical to an amino acid sequence set forth in any one of SEQ ID NOs: 1862, 1863, or 1864. In some embodiments, the polynucleotide encodes a M-MLV RT that comprises an amino acid sequence that is selected from the group consisting of SEQ ID NOs: 1862, 1863, and 1864. In some embodiments, the polynucleotide encodes a M-MLV RT that comprises an amino acid sequence that is set forth in SEQ ID NO: 1864.

[0115] In some embodiments, a prime editor comprises a eukaryotic RT, for example, a yeast, drosophila, rodent, or primate RT. In some embodiments, the prime editor comprises a Group II intron RT, for example, a. Geobacillus stearothermophilus Group II Intron (GsI-IIC) RT or a Eubacterium rectale group II intron (Eu.re.I2) RT. In some embodiments, the prime editor comprises a retron RT. In some embodiments, a prime editor comprises a eukaryotic RT, for example, a yeast, drosophila, rodent, or primate RT. In some embodiments, the prime editor comprises a Group II intron RT, for example, a. Geobacillus stearothermophilus Group II Intron (GsI-IIC) RT or a Eubacterium rectale group II intron (Eu.re.I2) RT. In some embodiments, the prime editor comprises a retron RT.

### Programmable DNA Binding Domain

[0116] In some embodiments, the DNA-binding domain of a prime editor is a programmable DNA binding domain. In some embodiments, a prime editor comprises a DNA binding domain that comprises an amino acid sequence that is at least 50%, at least 60%, at least 70%, at least 75%, at least 80%, 85%, at least 86%, at least 87%, at least 88%, at least 89%, at least 90%, at least 91%, at least 92%, at least 93%, at least 94%, at least 95%, at least 96%, at least 97%, at least 98%, at least 99%, or 100% identical to any one of the sequences set forth in SEQ ID NOs: 1865-1892. In some embodiments, the DNA binding domain comprises an amino acid sequence that has no more than 1, 2, 3, 4, 5, 6, 7, 8, 9, 10, 11, 12, 13, 14, 15, 16, 17, 18, 19, or 20 differences e.g., mutations e.g., deletions, substitutions and/or insertions compared to any one of the amino acid sequences set forth in SEQ ID NOs: 1865-1892. In some embodiments, the DNA binding domain of a prime editor is a programmable DNA binding domain. A programmable DNA binding domain refers to a protein domain that is designed to bind a specific nucleic acid sequence, e.g., a target DNA or a target RNA. In some embodiments, the DNA-binding domain is a polynucleotide programmable DNA-binding domain that can associate with a guide polynucleotide (e.g., a PEgRNA) that guides the DNA-binding domain to a specific DNA sequence, e.g., a search target sequence in a target gene. In some embodiments, the DNA-binding domain comprises a Clustered Regularly Interspaced Short Palindromic Repeats (CRISPR) Associated (Cas) protein. A Cas protein may comprise any Cas protein described herein or a functional fragment or functional variant thereof. In some embodiments, a DNA-binding domain may also comprise a zinc-finger protein domain. In other cases, a DNA-binding domain comprises a transcription activator-like effector domain (TALE). In some embodiments, the DNA-binding domain comprises a DNA nuclease. For example, the DNA-binding domain of a prime editor may comprise an RNA-guided DNA endonuclease, e.g., a Cas protein. In some embodiments, the DNA-binding domain comprises a zinc finger nuclease (ZFN) or a transcription activator like effector domain nuclease (TALEN), where one or more zinc finger motifs or TALE motifs are associated with one or more nucleases, e.g., a Fok I nuclease domain.

[0117] In some embodiments, the DNA-binding domain comprises a nuclease activity. In some embodiments, the DNA-binding domain of a prime editor comprises an endonuclease domain having single strand DNA cleavage activity. For example, the endonuclease domain may comprise a FokI nuclease domain. In some embodiments, the DNA-binding domain of a prime editor comprises a nuclease having full nuclease activity. In some embodiments, the DNA-binding domain of a prime editor comprises a nuclease having modified or reduced nuclease activity as compared to a wild type endonuclease domain. For example, the endonuclease domain may comprise one or more amino acid substitutions as compared to a wild type endonuclease domain. In some embodiments, the DNA-binding domain of a prime editor has a nickase activity. In some embodiments, the DNA-binding domain of a prime editor comprises a Cas protein domain that is a nickase. In some embodiments, compared to a wild type Cas protein, the Cas nickase comprises one or more amino acid substitutions in a nuclease domain that reduces or abolishes its double strand nuclease activity but retains DNA binding activity. In some embodiments, the Cas nickase comprises an amino acid substitution in a HNH domain. In some embodiments, the Cas nickase comprises an amino acid substitution in a RuvC domain.

[0118] In some embodiments, the DNA-binding domain comprises a CRISPR associated protein (Cas protein) domain. A Cas protein may be a Class 1 or a Class 2 Cas protein. A Cas protein can be a type I, type II, type III, type IV, type V Cas protein, or a type VI Cas protein. Non-limiting examples of Cas proteins include Cas1, Cas1B, Cas2, Cas3, Cas4, Cas5, Cas5d, Cas5t, Cas5h, Cas5a, Cas6, Cas7, Cas8, Cas8a, Cas8b, Cas8c, Cas9 (e.g., Csn1 or Csx12), Cas10, CaslOd, Cas12a/Cpf1, Cas12b/C2c1, Cas12c/C2c3, Cas12d/CasY, Cas12e/CasX, Cas12g, Cas12h, Cas12i. Csy1, Csy2, Csy3, Csy4, Cse1, Cse2, Cse3, Cse4, Cse5e, Csc1, Csc2, Csa5, Csn1, Csn2, Csm1, Csm2, Csm3, Csm4, Csm5, Csm6, Cmr1, Cmr3, Cmr4, Cmr5, Cmr6, Csb1, Csb2, Csb3, Csx17, Csx14, Csx10, Csx16, CsaX, Csx3, Csx1, Csx1S, Csx11, Csf1, Csf2, CsO, Csf4, Csd1, Csd2, Cst1, Cst2, Csh1, Csh2, Csa1, Csa2, Csa3, Csa4, Csa5, Type II Cas effector proteins, Type V Cas effector proteins, Type VI Cas effector proteins, CARF, DinG, Cpf1, Cas12b/C2c1, Cas12c/C2c3, Cas12b/C2c1, Cas12c/C2c3, SpCas9(K855A), eSpCas9(1.1), SpCas9-HF1, hyper accurate Cas9 variant (HypaCas9), Cas (D, and homologues, modified or engineered variants, mutants, and/or functional fragments thereof. A Cas protein can be a chimeric Cas protein that is fused to other proteins or polypeptides. A Cas protein can be a chimera of various Cas proteins, for example, comprising domains of Cas proteins from different organisms.

[0119] A Cas protein, e.g., Cas9, can be from any suitable organism. In some aspects, the organism is Streptococcus pyogenes (S. pyogenes). In some aspects, the organism is Staphylococcus aureus (S. aureus). In some aspects, the organism is Streptococcus thermophilus (S. thermophilus). In some embodiments, the organism is Staphylococcus lugdunensis.

[0120] Non-limiting examples of suitable organism include Streptococcus pyogenes, Streptococcus thermophilus, Streptococcus sp., Staphylococcus aureus, Nocardiopsis dassonvillei, Streptomyces pristinae spiralis, Streptomyces viridochromo genes, Streptomyces viridochromogenes, Streptosporangium roseum, Streptosporangium roseum, Alicyclobacillus acidocaldarius, Bacillus pseudomycoides, Bacillus selenitireducens, Exiguobacterium sibiricum, Lactobacillus delbrueckii, Lactobacillus salivarius, Microscilla marina, Burkholderiales bacterium, Polaromonas naphthalenivorans, Polaromonas sp., Crocosphaera watsonii, Cyanothece sp., Microcystis aeruginosa, Pseudomonas aeruginosa, Synechococcus sp., Acetohalobium arabaticum, Ammonifex degensii, Caldicellulosiruptor becscii, Candidatus Desulforudis, Clostridium botulinum, Clostridium difficile, Finegoldia magna, Natranaerobius thermophilus, Pelotomaculum thermopropionicum, Acidithiobacillus caldus, Acidithiobacillus ferrooxidans, Allochromatium vinosum, Marinobacter sp., Nitrosococcus halophilus, Nitrosococcus watsoni, Pseudoalteromonas haloplanktis, Ktedonobacter racemifer, Methanohalobium evestigatum, Anabaena variabilis, Nodularia spumigena, Nostoc sp., Arthrospira maxima, Arthrospira platensis, Arthrospira sp., Lyngbya sp., Microcoleus chthonoplastes, Oscillatoria sp., Petrotoga mobilis, Thermosipho africanus, Acaryochloris marina, Leptotrichia shahii, and Francisella novicida. In some embodiments, the organism is Streptococcus pyogenes (S. pyogenes). In some embodiments, the organism is Staphylococcus aureus (S. aureus). In some embodiments, the organism is Streptococcus thermophilus (S. thermophilus). In some embodiments, the organism is Staphylococcus lugdunensis (S. lugdunensis).

[0121] In some embodiments, a Cas protein can be derived from a variety of bacterial species including, but not limited to, Veillonella atypical, Fusobacterium nucleatum, Filifactor alocis, Solobacterium moorei, Coprococcus catus, Treponema denticola, Peptoniphilus duerdenii, Catenibacterium mitsuokai, Streptococcus mutans, Listeria innocua, Staphylococcus pseudintermedius, Acidaminococcus intestine, Olsenella uli, Oenococcus kitaharae, Bifidobacterium bifidum, Lactobacillus rhamnosus, Lactobacillus gasseri, Finegoldia magna, Mycoplasma mobile, Mycoplasma gallisepticum, Mycoplasma ovipneumoniae, Mycoplasma canis, Mycoplasma synoviae, Eubacterium rectale, Streptococcus thermophilus, Eubacterium dolichum, Lactobacillus coryniformis subsp. Torquens, Ilyobacter polytropus, Ruminococcus albus, Akkermansia muciniphila, Acidothermus cellulolyticus, Bifidobacterium longum, Bifidobacterium dentium, Corynebacterium diphtheria, Elusimicrobium minutum, Nitratifractor salsuginis, Sphaerochaeta globus, Fibrobacter succinogenes subsp. Succinogenes, Bacteroides fragilis, Capnocytophaga ochracea, Rhodopseudomonas palustris, Prevotella micans, Prevotella ruminicola, Flavobacterium columnare, Aminomonas paucivorans, Rhodospirillum rubrum, Candidatus Puniceispirillum marinum, Verminephrobacter eiseniae, Ralstonia syzygii, Dinoroseobacter shibae, Azospirillum, Nitrobacter hamburgensis, Bradyrhizobium, Wolinella succinogenes, Campylobacter jejuni subsp. Jejuni, Helicobacter mustelae, Bacillus cereus, Acidovorax ebreus, Clostridium perfringens, Parvibaculum lavamentivorans, Roseburia intestinalis, Neisseria meningitidis, Pasteurella multocida subsp. Multocida, Sutterella wadsworthensis, proteobacterium, Legionella pneumophila, Parasutterella excrementihominis, Wolinella succinogenes, and Francisella novicida.

[0122] In some embodiments, a Cas protein, e.g., Cas9, can be a wild type or a modified form of a Cas protein. In some embodiments, a Cas protein, e.g., Cas9, can be a nuclease active variant, nuclease inactive variant, a nickase, or a functional variant or functional fragment of a wild type Cas protein. In some embodiments, a Cas protein, e.g., Cas9, can be a wild type or a modified form of a Cas protein. A Cas protein, e.g., Cas9, can be a nuclease active variant, nuclease inactive variant, a nickase, or a functional variant or functional fragment of a wild type Cas protein. In some embodiments, a Cas protein, e.g., Cas9, can comprise an amino acid change such as a deletion, insertion, substitution, fusion, chimera, or any combination thereof relative to a corresponding wild-type version of the Cas protein. In some embodiments, a Cas protein can be a polypeptide with at least about 50%, 60%, 70%, 80%, 90%, 91%, 92%, 93%, 94%, 95%, 96%, 97%, 98%, 99%, or 100% sequence identity or sequence similarity to a wild type exemplary Cas protein.

[0123] A Cas protein, e.g., Cas9, may comprise one or more domains. Non-limiting examples of Cas domains include, guide nucleic acid recognition and/or binding domain, nuclease domains (e.g., DNase or RNase domains, RuvC, HNH), DNA binding domain, RNA binding domain, helicase domains, protein-protein interaction domains, and dimerization domains. In various embodiments, a Cas protein comprises a guide nucleic acid recognition and/or binding domain can interact with a guide nucleic acid, and one or more nuclease domains that comprise catalytic activity for nucleic acid cleavage.

[0124] In some embodiments, a Cas protein, e.g., Cas9, comprises one or more nuclease domains. A Cas protein can comprise an amino acid sequence having at least about 50%, 60%, 70%, 80%, 90%, 91%, 92%, 93%, 94%, 95%, 96%, 97%, 98%, 99%, or 100% sequence identity to a nuclease domain (e.g., RuvC domain, HNH domain) of a wild-type Cas protein. In some embodiments, a Cas protein comprises a single nuclease domain. For example, a Cpf1 may comprise a RuvC domain but lacks HNH domain. In some embodiments, a Cas protein comprises two nuclease domains, e.g., a Cas9 protein can comprise an HNH nuclease domain and a RuvC nuclease domain.

[0125] In some embodiments, a prime editor comprises a Cas protein, e.g., Cas9, wherein all nuclease domains of the Cas protein are active. In some embodiments, a prime editor comprises a Cas protein having one or more inactive nuclease domains. One or a plurality of the nuclease domains (e.g., RuvC, HNH) of a Cas protein can be deleted or mutated so that they are no longer functional or comprise reduced nuclease activity. In some embodiments, a Cas protein, e.g., Cas9, comprising mutations in a nuclease domain has reduced (e.g., nickase) or abolished nuclease activity while maintaining its ability to target a nucleic acid locus at a search target sequence when complexed with a guide nucleic acid, e.g., a PEgRNA.

[0126] In some embodiments, a prime editor comprises a Cas nickase that can bind to the target gene in a sequence-specific manner and generate a single-strand break at a protospacer within double-stranded DNA in the target gene, but not a double-strand break. For example, the Cas nickase can cleave the edit strand or the non-edit strand of the target gene, but may not cleave both. In some embodiments, a prime editor comprises a Cas nickase comprising two nuclease domains (e.g., Cas9), with one of the two nuclease domains modified to lack catalytic activity or deleted. In some embodiments, the Cas nickase of a prime editor comprises a nuclease inactive RuvC domain and a nuclease active HNH domain. In some embodiments, the Cas nickase of a prime editor comprises a nuclease inactive HNH domain and a nuclease active RuvC domain. In some embodiments, a prime editor comprises a Cas9 nickase having an amino acid substitution in the RuvC domain e.g., an amino acid substitution that reduces or abolishes nuclease activity of the RuvC domain. In some embodiments, the Cas9 nickase comprises a D10X amino acid substitution compared to a wild type S. pyogenes Cas9, wherein X is any amino acid other than D. In some embodiments, a prime editor comprises a Cas9 nickase having an amino acid substitution in the HNH domain e.g., an amino acid substitution that reduces or abolishes nuclease activity of the HNH domain. In some embodiments, the Cas9 nickase comprises a H840X amino acid substitution compared to a wild type S. pyogenes Cas9, wherein X is any amino acid other than H.

[0127] In some embodiments, a prime editor comprises a Cas protein that can bind to the target gene in a sequence-specific manner but lacks or has abolished nuclease activity and may not cleave either strand of a double stranded DNA in a target gene. Abolished activity or lacking activity can refer to an enzymatic activity less than 1%, less than 2%, less than 3%, less than 4%, less than 5%, less than 6%, less than 7%, less than 8%, less than 9%, or less than 10% activity compared to a wild-type exemplary activity (e.g., wild-type Cas9 nuclease activity). In some embodiments, a Cas protein of a prime editor completely lacks nuclease activity. A nuclease, e.g., Cas9, that lacks nuclease activity may be referred to as nuclease inactive or “nuclease dead” (abbreviated by “d”). A nuclease dead Cas protein (e.g., dCas, dCas9) can bind to a target polynucleotide but may not cleave the target polynucleotide. In some embodiments, a dead Cas protein is a dead Cas9 protein. In some embodiments, a prime editor comprises a nuclease dead Cas protein wherein all of the nuclease domains (e.g., both RuvC and HNH nuclease domains in a Cas9 protein; RuvC nuclease domain in a Cpf1 protein) are mutated to lack catalytic activity, or are deleted.

[0128] A Cas protein can be modified. A Cas protein, e.g., Cas9, can be modified to increase or decrease nucleic acid binding affinity, nucleic acid binding specificity, and/or enzymatic activity. Cas proteins can also be modified to change any other activity or property of the protein, such as stability. For example, one or more nuclease domains of the Cas protein can be modified, deleted, or inactivated, or a Cas protein can be truncated to remove domains that are not essential for the function of the protein or to optimize (e.g., enhance or reduce) the activity of the Cas protein.

[0129] A Cas protein can be a fusion protein. For example, a Cas protein can be fused to a cleavage domain, an epigenetic modification domain, a transcriptional regulation domain, or a polymerase domain. A Cas protein can also be fused to a heterologous polypeptide providing increased or decreased stability. The fused domain or heterologous polypeptide can be located at the N-terminus, the C-terminus, or internally within the Cas protein.

[0130] In some embodiments, the Cas protein of a prime editor is a Class 2 Cas protein. In some embodiments, the Cas protein is a type II Cas protein. In some embodiments, the Cas protein is a Cas9 protein, a modified version of a Cas9 protein, a Cas9 protein homolog, mutant, variant, or a functional fragment thereof. As used herein, a Cas9, Cas9 protein, Cas9 polypeptide or a Cas9 nuclease refers to an RNA guided nuclease comprising one or more Cas9 nuclease domains and a Cas9 gRNA binding domain having the ability to bind a guide polynucleotide, e.g., a PEgRNA. A Cas9 protein may refer to a wild type Cas9 protein from any organism or a homolog, ortholog, or paralog from any organisms; any functional mutants or functional variants thereof, or any functional fragments or domains thereof. In some embodiments, a prime editor comprises a full-length Cas9 protein. In some embodiments, the Cas9 protein can generally comprises at least about 50%, 60%, 70%, 80%, 90%, 100% sequence identity to a wild type reference Cas9 protein (e.g., Cas9 from S. pyogenes). In some embodiments, the Cas9 comprises an amino acid change such as a deletion, insertion, substitution, fusion, chimera, or any combination thereof as compared to a wild type reference Cas9 protein.

[0131] In some embodiments, a Cas9 protein may comprise a Cas9 protein from Streptococcus pyogenes (Sp), Staphylococcus aureus (Sa), Streptococcus canis (Sc), Streptococcus thermophilus (St), Staphylococcus lugdunensis (Slu), Neisseria meningitidis (Nm), Campylobacter jejuni (Cj), Francisella novicida (Fn), or Treponema denticola (Td), or any Cas9 homolog or ortholog from an organism known in the art. In some embodiments, a Cas9 polypeptide is a SpCas9 polypeptide, e.g., comprising an amino acid sequence as set forth in NCBI Accession No. WP_038431314 or a fragment or variant thereof. In some embodiments, a Cas9 polypeptide is a SaCas9 polypeptide, e.g., comprising an amino acid sequence as set forth in Uniprot Accession No. J7RUA5 or a fragment or variant thereof. In some embodiments, a Cas9 polypeptide is a ScCas9 polypeptide, e.g., comprising an amino acid sequence as set forth in Uniprot Accession No. A0A3P5YA78 or a fragment or variant thereof. In some embodiments, a Cas9 polypeptide is a StCas9 polypeptide, e.g., comprising an amino acid sequence as set forth in NCBI Accession No. WP_007896501.1 or a fragment or variant thereof. In some embodiments, a Cas9 polypeptide is a SluCas9 polypeptide, e.g., comprising an amino acid sequence as set forth in any of NCBI Accession No. WP_230580236.1 or WP_250638315.1 or WP_242234150.1, WP_241435384.1, WP_002460848.1, KAK58371.1, or a fragment or variant thereof. In some embodiments, a Cas9 polypeptide is a NmCas9 polypeptide, e.g., comprising an amino acid sequence as set forth in any of NCBI Accession No. WP_002238326.1 or WP_061704949.1 or a fragment or variant thereof. In some embodiments, a Cas9 polypeptide is a CjCas9 polypeptide, e.g., comprising an amino acid sequence as set forth in any of NCBI Accession No. WP_100612036.1, WP 116882154.1, WP 116560509.1, WP_116484194.1, WP_116479303.1, WP_115794652.1, WP_100624872.1, or a fragment or variant thereof. In some embodiments, a Cas9 polypeptide is a FnCas9 polypeptide, e.g., comprising the amino acid sequence as set forth in Uniprot Accession No. A0Q5Y3 or a fragment or variant thereof. In some embodiments, a Cas9 polypeptide is a TdCas9 polypeptide, e.g., comprising the amino acid sequence as set forth in NCBI Accession No. WP_147625065.1 or a fragment or variant thereof. In some embodiments, a Cas9 polypeptide is a chimera comprising domains from two or more of the organisms described herein or those known in the art. In some embodiments, a Cas9 polypeptide is a Cas9 polypeptide from Streptococcus macacae, e.g., comprising the amino acid sequence as set forth in NCBI Accession No. WP_003079701.1 or a fragment or variant thereof. In some embodiments, a Cas9 polypeptide is a Cas9 polypeptide generated by replacing a PAM interaction domain of a SpCas9 with that of a Streptococcus macacae Cas9 (Spy-mac Cas9). Exemplary Cas sequences are provided in Table 8 below.

[0132] In some embodiments, a Cas9 protein comprises an amino acid sequence that is at least 50%, at least 60%, at least 70%, at least 75%, at least 80%, 85%, at least 86%, at least 87%, at least 88%, at least 89%, at least 90%, at least 91%, at least 92%, at least 93%, at least 94%, at least 95%, at least 96%, at least 97%, at least 98%, at least 99%, or 100% identical to any one of the sequences set forth in SEQ ID NOs: 1865-1892. In some embodiments, a Cas9 protein is a Cas9 nickase that comprises an amino acid sequence that is at least 50%, at least 60%, at least 70%, at least 75%, at least 80%, 85%, at least 86%, at least 87%, at least 88%, at least 89%, at least 90%, at least 91%, at least 92%, at least 93%, at least 94%, at least 95%, at least 96%, at least 97%, at least 98%, at least 99%, or 100% identical to any one of the sequences set forth in SEQ ID NOs: 1866, 1867, 1868, 1870, 1871, 1873, 1874, 1876, 1877, 1879, 1880, 1882, 1883, 1885, 1886, 1888, 1889, 1891, or 1892. In some embodiments, a Cas9 protein comprises an amino acid sequence that is selected from the group consisting of SEQ ID NOs: 1865-1892. In some embodiments, a prime editor comprises a Cas9 protein that comprises an amino acid sequence that lacks a N-terminus methionine relative to an amino acid sequence set forth in any one of SEQ ID NOs: 1865, 1866, 1869, 1870, 1872, 1873, 1875, 1876, 1878, 1879, 1881, 1882, 1884, 1885, 1887, 1888, 1890, or 1891. In some embodiments, the prime editing compositions or prime editing systems disclosed herein comprises a polynucleotide (e.g., a DNA, or an RNA, e.g., an mRNA) that encodes a Cas9 protein that comprises an amino acid sequence that is at least 50%, at least 60%, at least 70%, at least 75%, at least 80%, 85%, at least 86%, at least 87%, at least 88%, at least 89%, at least 90%, at least 91%, at least 92%, at least 93%, at least 94%, at least 95%, at least 96%, at least 97%, at least 98%, at least 99%, or 100% identical to any one of the sequences set forth in SEQ ID NOs: 1865-1892.

[0133] In some embodiments, a Cas9 protein comprises a Cas9 protein from Streptococcus pyogenes (Sp), e.g., as according to NC_002737.2:854751-858857 or the protein encoded by UniProt Q99ZW2, e.g., as according to SEQ ID NO: 1865. In some embodiments, a prime editor comprises a Cas9 protein (e.g., a SpCas9) as according to any one of the sequences set forth in SEQ ID NOs: 1865-1868 or a variant thereof. In some embodiments, the Cas9 protein is a SpCas9. In some embodiments, a SpCas9 can be a wild type SpCas9, a SpCas9 variant, or a nickase SpCas9. In some embodiments, the SpCas9 lacks the N-terminus methionine relative to a corresponding SpCas9 (e.g., a wild type SpCas9, a SpCas9 variant or a nickase SpCas9). In some embodiments, a prime editor comprises a Cas9 protein, having an amino acid sequence as according to SEQ ID NO: 1865, not including the N-terminus methionine. In some embodiments, a wild type SpCas9 comprises an amino acid sequence set forth in SEQ ID NO: 1865. In some embodiments, a prime editor comprises a Cas9 protein comprising one or more mutations (e.g., amino acid substitutions, insertions and/or deletions) relative to a corresponding wild type Cas9 protein (e.g., a wild type SpCas9). In some embodiments, the Cas9 protein comprising one or more mutations relative to a wild type Cas9 (e.g., a wild type SpCas9) protein comprises an amino acid sequence set forth in SEQ ID NO: 1866, SEQ ID NO: 1867 or SEQ ID NO: 1868. Exemplary Streptococcus pyogenes Cas9 (SpCas9) amino acid sequence useful in the prime editors disclosed herein are provided below in SEQ ID NOs: 1865-1868.

[0134] In some embodiments, a prime editor comprises a Cas9 protein (e.g., a SluCas9) as according to any one of the SEQ ID NOS: 1869-1871 or a variant thereof. In some embodiments, a prime editor comprises a Cas9 protein from Staphylococcus lugdunensis (SluCas9) e.g., as according to any one of the SEQ ID NOs: 1869-1871 or a variant thereof. In some embodiments, the Cas9 protein is a SluCas9. In some embodiments, a SluCas9 can be a wild type SluCas9, a SluCas9 variant, or a nickase SluCas9. In some embodiments, the SluCas9 lacks the N-terminus methionine relative to a corresponding SluCas9 (e.g., a wild type SluCas9, a SluCas9 variant or a nickase SluCas9). In some embodiments, a prime editor comprises a Cas9 protein, having an amino acid sequence as according to SEQ ID NO: 1869, not including the N-terminus methionine. In some embodiments, a wild type SluCas9 comprises an amino acid sequence set forth in SEQ ID NO: 1869. In some embodiments, a prime editor comprises a Cas9 protein comprising one or more mutations (e.g., amino acid substitutions, insertions and/or deletions) relative to a corresponding wild type Cas9 protein (e.g., a wild type SluCas9). In some embodiments, the Cas9 protein comprising one or mutations relative to a wild type Cas9 protein comprises an amino acid sequence set forth in SEQ ID NO: 1870 or SEQ ID NO: 1871. Exemplary Staphylococcus lugdunensis Cas9 (SluCas9) amino acid sequence useful in the prime editors disclosed herein are provided below in SEQ ID NOs: 1869-1871.

[0135] In some embodiments, a prime editor comprises a Cas9 protein from Staphylococcus aureus (SaCas9) e.g., as according to any of the SEQ ID NOS: 1872-1874, or a variant thereof. In some embodiments, a prime editor comprises a Cas9 protein from Staphylococcus aureus (SaCas9) e.g., as according to any one of the SEQ ID NOS: 1872-1874, or a variant thereof. In some embodiments, the Cas9 protein is a SaCas9. In some embodiments, a SaCas9 can be a wild type SaCas9, a SaCas9 variant, or a nickase SaCas9. In some embodiments, the SaCas9 lacks the N-terminus methionine relative to a corresponding SaCas9 (e.g., a wild type SaCas9, a SaCas9 variant or a nickase SaCas9). In some embodiments, a prime editor comprises a Cas9 protein, having an amino acid sequence as according to SEQ ID NO: 1872, not including the N-terminus methionine. In some embodiments, a wild type SaCas9 comprises an amino acid sequence set forth in SEQ ID NO: 1872. In some embodiments, a prime editor comprises a Cas9 protein comprising one or more mutations (e.g., amino acid substitutions, insertions and/or deletions relative to a corresponding wild type Cas9 protein (e.g., a wild type SaCas9). In some embodiments, the Cas9 protein comprising one or more mutations relative to a wild type Cas9 protein comprises an amino acid sequence set forth in SEQ ID NO: 1873 or SEQ ID NO: 1874. Exemplary Staphylococcus aureus Cas9 (SaCas9) amino acid sequence useful in the prime editors disclosed herein are provided below in SEQ ID NOs: 1872-1874.

[0136] In some embodiments, a prime editor comprises a Cas protein, e.g., a Cas9 variant, comprising modifications that allow altered PAM recognition. Exemplary Cas9 protein amino acid sequence (e.g., Cas9 variant with altered PAM recognition specificities) that are useful in the Prime editors of the disclosure are provided below in SEQ ID NOs 1875-1883, 1890-1892. In some embodiments, a prime editor comprises a Cas9 protein as according to any one of the sequences set forth in SEQ ID NOs: 1875-1883, 1890-1892 or a variant thereof. In some embodiments, the Cas9 protein is a Cas9 variant, for example, a SpCas9 variant (e.g., SpCas9-NG, SpCas9-NGA, SpRY, or SpG). In some embodiments, the Cas9 protein lacks the N-terminus methionine relative to a corresponding Cas9 protein (e.g., a Cas9 variant set forth in any one of SEQ ID NOs: 1875, 1876, 1878, 1879, 1881, 1882, 1890, or 1891). In some embodiments, a prime editor comprises a Cas9 protein (e.g., a Cas9 variant), having an amino acid sequence as according to any one of SEQ ID NOs: 1875, 1878, 1881, or 1890 not including the N-terminus methionine. In some embodiments, a prime editor comprises a Cas9 protein comprising one or more mutations (e.g., amino acid substitutions, insertions and/or deletions) relative to a corresponding Cas9 protein (e.g., a Cas9 protein set forth in any one of SEQ ID NOs: 1875, 1878, 1881, or 1890). In some embodiments, the Cas9 protein comprising one or mutations relative to a corresponding Cas9 protein comprises an amino acid sequence set forth in any one of SEQ ID NOs: 1876, 1877, 1879, 1880, 1882, 1883, 1891, or 1892.

[0137] In some embodiments, a Cas9 protein is a chimeric Cas9, e.g., modified Cas9, e.g., synthetic RNA-guided nucleases (sRGNs), e.g., modified by DNA family shuffling, e.g., sRGN3.1, sRGN3.3. In some embodiments, the DNA family shuffling comprises, fragmentation and reassembly of parental Cas9 genes, e.g., one or more of Cas9s from Staphylococcus hyicus (Shy), Staphylococcus lugdunensis (Slu), Staphylococcus microti (Smi), and Staphylococcus pasteurii (Spa). In some embodiments, a modified sluCas9 shows increased editing efficiency and/or specificity relative to a sluCas9 that is not modified. In some embodiments, a modified Cas9, e.g., a sRGN shows at least 10%, at least 20%, at least 30%, at least 40%, at least 50%, at least 60%, at least 70%, at least 80%, at least 90%, at least 100%, at least 150%, at least 200%, at least 300%, at least 400%, at least 500%, at least 600%, at least 700%, at least 800%, at least 900%, or at least 1000% increase in editing efficiency compared to a Cas9 that is not modified. In some embodiments, a Cas9, e.g., a sRGN shows at least 10%, at least 20%, at least 30%, at least 40%, at least 50%, at least 60%, at least 70%, at least 80%, at least 90%, at least 100%, at least 150%, at least 200%, at least 300%, at least 400%, at least 500%, at least 600%, at least 700%, at least 800%, at least 900%, or at least 1000% increase in specificity compared to a Cas9 that is not modified. In some embodiments, a Cas9, e.g., a sRGN shows at least 10%, at least 20%, at least 30%, at least 40%, at least 50%, at least 60%, at least 70%, at least 80%, at least 90%, at least 100%, at least 150%, at least 200%, at least 300%, at least 400%, at least 500%, at least 600%, at least 700%, at least 800%, at least 900%, or at least 1000% increase in cleavage activity compared to a Cas9 that is not modified. In some embodiments, a Cas9, e.g., a sRGN shows ability to cleave a 5′-NNGG-3′ PAM-containing target. In some embodiments, a prime editor comprises a Cas9 protein (e.g., a chimeric Cas9), e.g., as according any one of the sequences set forth in SEQ ID NOs: 1884-1889, or a variant thereof. Exemplary amino acid sequences of Cas9 protein (e.g., sRGN) useful in the prime editors disclosed herein are provided below in SEQ ID NOs: 1884-1889. In some embodiments, a prime editor comprises a Cas9 protein, that lacks a N-terminus methionine relative to SEQ ID NO: 1884 or SEQ ID NO: 1887. In some embodiments, a prime editor comprises a Cas9 protein comprising one or more mutations (e.g., amino acid substitutions, insertions and/or deletions) relative to a corresponding Cas9 protein (e.g., a Cas9 protein set forth in SEQ ID NO: 1884 or SEQ ID NO: 1887). In some embodiments, the Cas9 protein comprising one or mutations relative to a corresponding Cas9 protein comprises an amino acid sequence set forth in any one of SEQ ID NOs: 1885, 1886, 1888, or 1889.

TABLE 8
Exemplary Cas protein sequences

| SEQ | | |
|---|---|---|
| ID | Sequence | |
| NO: | description | Amino acid sequence |
| 1865 | wild type | MDKKYSIGLDIGTNSVGWAVITDEYKVPSKKFKVLGNTDRHSIKKNLIGAL |
| | Streptococcus | LFDSGETAEATRLKRTARRRYTRRKNRICYLQEIFSNEMAKVDDSFFHRLE |
| | Pyogenes | ESFLVEEDKKHERHPIFGNIVDEVAYHEKYPTIYHLRKKLVDSTDKADLRLI |
| | Cas9 | YLALAHMIKFRGHFLIEGDLNPDNSDVDKLFIQLVQTYNQLFEENPINASGV |
| | (SpCas9) | DAKAILSARLSKSRRLENLIAQLPGEKKNGLFGNLIALSLGLTPNFKSNFDL |
| | | AEDAKLQLSKDTYDDDLDNLLAQIGDQYADLFLAAKNLSDAILLSDILRVN |
| | | TEITKAPLSASMIKRYDEHHQDLTLLKALVRQQLPEKYKEIFFDQSKNGYA |
| | | GYIDGGASQEEFYKFIKPILEKMDGTEELLVKLNREDLLRKQRTFDNGSIPH |
| | | QIHLGELHAILRRQEDFYPFLKDNREKIEKILTFRIPYYVGPLARGNSRFAW |
| | | MTRKSEETITPWNFEEVVDKGASAQSFIERMTNFDKNLPNEKVLPKHSLLY |
| | | EYFTVYNELTKVKYVTEGMRKPAFLSGEQKKAIVDLLFKTNRKVTVKQLK |
| | | EDYFKKIECFDSVEISGVEDRFNASLGTYHDLLKIIKDKDFLDNEENEDILED |
| | | IVLTLTLFEDREMIEERLKTYAHLFDDKVMKQLKRRRYTGWGRLSRKLING |
| | | IRDKQSGKTILDFLKSDGFANRNFMQLIHDDSLTFKEDIQKAQVSGQGDSL |
| | | HEHIANLAGSPAIKKGILQTVKVVDELVKVMGRHKPENIVIEMARENQTTQ |
| | | KGQKNSRERMKRIEEGIKELGSQILKEHPVENTQLQNEKLYLYYLQNGRD |
| | | MYVDQELDINRLSDYDVDHIVPQSFLKDDSIDNKVLTRSDKNRGKSDNVPS |
| | | EEVVKKMKNYWRQLLNAKLITQRKFDNLTKAERGGLSELDKAGFIKRQLV |
| | | ETRQITKHVAQILDSRMNTKYDENDKLIREVKVITLKSKLVSDFRKDFQFY |
| | | KVREINNYHHAHDAYLNAVVGTALIKKYPKLESEFVYGDYKVYDVRKMI |
| | | AKSEQEIGKATAKYFFYSNIMNFFKTEITLANGEIRKRPLIETNGETGEIVWD |
| | | KGRDFATVRKVLSMPQVNIVKKTEVQTGGFSKESILPKRNSDKLIARKKD |
| | | WDPKKYGGFDSPTVAYSVLVVAKVEKGKSKKLKSVKELLGITIMERSSFE |
| | | KNPIDFLEAKGYKEVKKDLIIKLPKYSLFELENGRKRMLASAGELQKGNEL |
| | | ALPSKYVNFLYLASHYEKLKGSPEDNEQKQLFVEQHKHYLDEIIEQISEFSK |
| | | RVILADANLDKVLSAYNKHRDKPIREQAENIIHLFTLTNLGAPAAFKYFDTT |
| | | IDRKRYTSTKEVLDATLIHQSITGLYETRIDLSQLGGD |
| 1866 | SpCas9 | MDKKYSIGLDIGTNSVGWAVITDEYKVPSKKFKVLGNTDRHSIKKNLIGAL |
| | H840A | LFDSGETAEATRLKRTARRRYTRRKNRICYLQEIFSNEMAKVDDSFFHRLE |
| | nickase | ESFLVEEDKKHERHPIFGNIVDEVAYHEKYPTIYHLRKKLVDSTDKADLRLI |
| | | YLALAHMIKFRGHFLIEGDLNPDNSDVDKLFIQLVQTYNQLFEENPINASGV |
| | | DAKAILSARLSKSRRLENLIAQLPGEKKNGLFGNLIALSLGLTPNFKSNFDL |
| | | AEDAKLQLSKDTYDDDLDNLLAQIGDQYADLFLAAKNLSDAILLSDILRVN |
| | | TEITKAPLSASMIKRYDEHHQDLTLLKALVRQQLPEKYKEIFFDQSKNGYA |
| | | GYIDGGASQEEFYKFIKPILEKMDGTEELLVKLNREDLLRKQRTFDNGSIPH |
| | | QIHLGELHAILRRQEDFYPFLKDNREKIEKILTFRIPYYVGPLARGNSRFAW |
| | | MTRKSEETITPWNFEEVVDKGASAQSFIERMTNFDKNLPNEKVLPKHSLLY |
| | | EYFTVYNELTKVKYVTEGMRKPAFLSGEQKKAIVDLLFKTNRKVTVKQLK |
| | | EDYFKKIECFDSVEISGVEDRFNASLGTYHDLLKIIKDKDFLDNEENEDILED |
| | | IVLTLTLFEDREMIEERLKTYAHLFDDKVMKQLKRRRYTGWGRLSRKLING |
| | | IRDKQSGKTILDFLKSDGFANRNFMQLIHDDSLTFKEDIQKAQVSGQGDSL |
| | | HEHIANLAGSPAIKKGILQTVKVVDELVKVMGRHKPENIVIEMARENQTTQ |
| | | KGQKNSRERMKRIEEGIKELGSQILKEHPVENTQLQNEKLYLYYLQNGRD |
| | | MYVDQELDINRLSDYDVDAIVPQSFLKDDSIDNKVLTRSDKNRGKSDNVPS |
| | | EEVVKKMKNYWRQLLNAKLITQRKFDNLTKAERGGLSELDKAGFIKRQLV |
| | | ETRQITKHVAQILDSRMNTKYDENDKLIREVKVITLKSKLVSDFRKDFQFY |
| | | KVREINNYHHAHDAYLNAVVGTALIKKYPKLESEFVYGDYKVYDVRKMI |
| | | AKSEQEIGKATAKYFFYSNIMNFFKTEITLANGEIRKRPLIETNGETGEIVWD |
| | | KGRDFATVRKVLSMPQVNIVKKTEVQTGGFSKESILPKRNSDKLIARKKD |
| | | WDPKKYGGFDSPTVAYSVLVVAKVEKGKSKKLKSVKELLGITIMERSSFE |
| | | KNPIDFLEAKGYKEVKKDLIIKLPKYSLFELENGRKRMLASAGELQKGNEL |
| | | ALPSKYVNFLYLASHYEKLKGSPEDNEQKQLFVEQHKHYLDEIIEQISEFSK |
| | | RVILADANLDKVLSAYNKHRDKPIREQAENIIHLFTLTNLGAPAAFKYFDTT |
| | | IDRKRYTSTKEVLDATLIHQSITGLYETRIDLSQLGGD |
| 1867 | Met (−) | DKKYSIGLDIGTNSVGWAVITDEYKVPSKKFKVLGNTDRHSIKKNLIGALL |
| | SpCas9 | FDSGETAEATRLKRTARRRYTRRKNRICYLQEIFSNEMAKVDDSFFHRLEE |
| | H840A | SFLVEEDKKHERHPIFGNIVDEVAYHEKYPTIYHLRKKLVDSTDKADLRLIY |
| | nickase | LALAHMIKFRGHFLIEGDLNPDNSDVDKLFIQLVQTYNQLFEENPINASGVD |
| | | AKAILSARLSKSRRLENLIAQLPGEKKNGLFGNLIALSLGLTPNFKSNFDLA |
| | | EDAKLQLSKDTYDDDLDNLLAQIGDQYADLFLAAKNLSDAILLSDILRVNT |
| | | EITKAPLSASMIKRYDEHHQDLTLLKALVRQQLPEKYKEIFFDQSKNGYAG |
| | | YIDGGASQEEFYKFIKPILEKMDGTEELLVKLNREDLLRKQRTFDNGSIPHQ |
| | | IHLGELHAILRRQEDFYPFLKDNREKIEKILTFRIPYYVGPLARGNSRFAWM |
| | | TRKSEETITPWNFEEVVDKGASAQSFIERMTNFDKNLPNEKVLPKHSLLYE |
| | | YFTVYNELTKVKYVTEGMRKPAFLSGEQKKAIVDLLFKTNRKVTVKQLKE |
| | | DYFKKIECFDSVEISGVEDRFNASLGTYHDLLKIIKDKDFLDNEENEDILEDI |
| | | VLTLTLFEDREMIEERLKTYAHLFDDKVMKQLKRRRYTGWGRLSRKLINGI |
| | | RDKQSGKTILDFLKSDGFANRNFMQLIHDDSLTFKEDIQKAQVSGQGDSLH |
| | | EHIANLAGSPAIKKGILQTVKVVDELVKVMGRHKPENIVIEMARENQTTQK |
| | | GQKNSRERMKRIEEGIKELGSQILKEHPVENTQLQNEKLYLYYLQNGRDM |
| | | YVDQELDINRLSDYDVDAIVPQSFLKDDSIDNKVLTRSDKNRGKSDNVPSE |
| | | EVVKKMKNYWRQLLNAKLITQRKFDNLTKAERGGLSELDKAGFIKRQLVE |
| | | TRQITKHVAQILDSRMNTKYDENDKLIREVKVITLKSKLVSDFRKDFQFYK |
| | | VREINNYHHAHDAYLNAVVGTALIKKYPKLESEFVYGDYKVYDVRKMIA |
| | | KSEQEIGKATAKYFFYSNIMNFFKTEITLANGEIRKRPLIETNGETGEIVWDK |
| | | GRDFATVRKVLSMPQVNIVKKTEVQTGGFSKESILPKRNSDKLIARKKDW |
| | | DPKKYGGFDSPTVAYSVLVVAKVEKGKSKKLKSVKELLGITIMERSSFEKN |
| | | PIDFLEAKGYKEVKKDLIIKLPKYSLFELENGRKRMLASAGELQKGNELAL |
| | | PSKYVNFLYLASHYEKLKGSPEDNEQKQLFVEQHKHYLDEIIEQISEFSKRV |
| | | ILADANLDKVLSAYNKHRDKPIREQAENIIHLFTLTNLGAPAAFKYFDTTID |
| | | RKRYTSTKEVLDATLIHQSITGLYETRIDLSQLGGD |
| 1868 | Met (−) | DKKYSIGLDIGTNSVGWAVITDEYKVPSKKFKVLGNTDRHSIKKNLIGALL |
| | CAS9 | FDSGETAEATRLKRTARRRYTRRKNRICYLQEIFSNEMAKVDDSFFHRLEE |
| | (R221K | SFLVEEDKKHERHPIFGNIVDEVAYHEKYPTIYHLRKKLVDSTDKADLRLIY |
| | N394K | LALAHMIKFRGHFLIEGDLNPDNSDVDKLFIQLVQTYNQLFEENPINASGVD |
| | H840A) | AKAILSARLSKSRKLENLIAQLPGEKKNGLFGNLIALSLGLTPNFKSNFDLA |
| | nickase | EDAKLQLSKDTYDDDLDNLLAQIGDQYADLFLAAKNLSDAILLSDILRVNT |
| | | EITKAPLSASMIKRYDEHHQDLTLLKALVRQQLPEKYKEIFFDQSKNGYAG |
| | | YIDGGASQEEFYKFIKPILEKMDGTEELLVKLKREDLLRKQRTFDNGSIPHQ |
| | | IHLGELHAILRRQEDFYPFLKDNREKIEKILTFRIPYYVGPLARGNSRFAWM |
| | | TRKSEETITPWNFEEVVDKGASAQSFIERMTNFDKNLPNEKVLPKHSLLYE |
| | | YFTVYNELTKVKYVTEGMRKPAFLSGEQKKAIVDLLFKTNRKVTVKQLKE |
| | | DYFKKIECFDSVEISGVEDRFNASLGTYHDLLKIIKDKDFLDNEENEDILEDI |
| | | VLTLTLFEDREMIEERLKTYAHLFDDKVMKQLKRRRYTGWGRLSRKLINGI |
| | | RDKQSGKTILDFLKSDGFANRNFMQLIHDDSLTFKEDIQKAQVSGQGDSLH |
| | | EHIANLAGSPAIKKGILQTVKVVDELVKVMGRHKPENIVIEMARENQTTQK |
| | | GQKNSRERMKRIEEGIKELGSQILKEHPVENTQLQNEKLYLYYLQNGRDM |
| | | YVDQELDINRLSDYDVDAIVPQSFLKDDSIDNKVLTRSDKNRGKSDNVPSE |
| | | EVVKKMKNYWRQLLNAKLITQRKFDNLTKAERGGLSELDKAGFIKRQLVE |
| | | TRQITKHVAQILDSRMNTKYDENDKLIREVKVITLKSKLVSDFRKDFQFYK |
| | | VREINNYHHAHDAYLNAVVGTALIKKYPKLESEFVYGDYKVYDVRKMIA |
| | | KSEQEIGKATAKYFFYSNIMNFFKTEITLANGEIRKRPLIETNGETGEIVWDK |
| | | GRDFATVRKVLSMPQVNIVKKTEVQTGGFSKESILPKRNSDKLIARKKDW |
| | | DPKKYGGFDSPTVAYSVLVVAKVEKGKSKKLKSVKELLGITIMERSSFEKN |
| | | PIDFLEAKGYKEVKKDLIIKLPKYSLFELENGRKRMLASAGELQKGNELAL |
| | | PSKYVNFLYLASHYEKLKGSPEDNEQKQLFVEQHKHYLDEIIEQISEFSKRV |
| | | ILADANLDKVLSAYNKHRDKPIREQAENIIHLFTLTNLGAPAAFKYFDTTID |
| | | RKRYTSTKEVLDATLIHQSITGLYETRIDLSQLGGD |
| 1869 | wild type | MNQKFILGLDIGITSVGYGLIDYETKNIIDAGVRLFPEANVENNEGRRSKRG |
| | Staphylococcus | SRRLKRRRIHRLERVKKLLEDYNLLDQSQIPQSTNPYAIRVKGLSEALSKDE |
| | lugdunensis | LVIALLHIAKRRGIHKIDVIDSNDDVGNELSTKEQLNKNSKLLKDKFVCQIQ |
| | (Slu)Cas9 | LERMNEGQVRGEKNRFKTADIIKEIIQLLNVQKNFHQLDENFINKYIELVEM |
| | | RREYFEGPGKGSPYGWEGDPKAWYETLMGHCTYFPDELRSVKYAYSADL |
| | | FNALNDLNNLVIQRDGLSKLEYHEKYHIIENVFKQKKKPTLKQIANEINVNP |
| | | EDIKGYRITKSGKPQFTEFKLYHDLKSVLFDQSILENEDVLDQIAEILTIYQD |
| | | KDSIKSKLTELDILLNEEDKENIAQLTGYTGTHRLSLKCIRLVLEEQWYSSR |
| | | NQMEIFTHLNIKPKKINLTAANKIPKAMIDEFILSPVVKRTFGQAINLINKIIE |
| | | KYGVPEDIIIELARENNSKDKQKFINEMQKKNENTRKRINEIIGKYGNQNAK |
| | | RLVEKIRLHDEQEGKCLYSLESIPLEDLLNNPNHYEVDHIIPRSVSFDNSYHN |
| | | KVLVKQSENSKKSNLTPYQYFNSGKSKLSYNQFKQHILNLSKSQDRISKKK |
| | | KEYLLEERDINKFEVQKEFINRNLVDTRYATRELTNYLKAYFSANNMNVK |
| | | VKTINGSFTDYLRKVWKFKKERNHGYKHHAEDALIIANADFLFKENKKLK |
| | | AVNSVLEKPEIESKQLDIQVDSEDNYSEMFIIPKQVQDIKDFRNFKYSHRVD |
| | | KKPNRQLINDTLYSTRKKDNSTYIVQTIKDIYAKDNTTLKKQFDKSPEKFL |
| | | MYQHDPRTFEKLEVIMKQYANEKNPLAKYHEETGEYLTKYSKKNNGPIVK |
| | | SLKYIGNKLGSHLDVTHQFKSSTKKLVKLSIKPYRFDVYLTDKGYKFITISY |
| | | LDVLKKDNYYYIPEQKYDKLKLGKAIDKNAKFIASFYKNDLIKLDGEIYKII |
| | | GVNSDTRNMIELDLPDIRYKEYCELNNIKGEPRIKKTIGKKVNSIEKLTTDV |
| | | LGNVFTNTQYTKPQLLFKRGN |
| 1870 | SluCas9 | MNQKFILGLDIGITSVGYGLIDYETKNIIDAGVRLFPEANVENNEGRRSKRG |
| | N582A | SRRLKRRRIHRLERVKKLLEDYNLLDQSQIPQSTNPYAIRVKGLSEALSKDE |
| | nickase | LVIALLHIAKRRGIHKIDVIDSNDDVGNELSTKEQLNKNSKLLKDKFVCQIQ |
| | | LERMNEGQVRGEKNRFKTADIIKEIIQLLNVQKNFHQLDENFINKYIELVEM |
| | | RREYFEGPGKGSPYGWEGDPKAWYETLMGHCTYFPDELRSVKYAYSADL |
| | | FNALNDLNNLVIQRDGLSKLEYHEKYHIIENVFKQKKKPTLKQIANEINVNP |
| | | EDIKGYRITKSGKPQFTEFKLYHDLKSVLFDQSILENEDVLDQIAEILTIYQD |
| | | KDSIKSKLTELDILLNEEDKENIAQLTGYTGTHRLSLKCIRLVLEEQWYSSR |
| | | NQMEIFTHLNIKPKKINLTAANKIPKAMIDEFILSPVVKRTFGQAINLINKIIE |
| | | KYGVPEDIIIELARENNSKDKQKFINEMQKKNENTRKRINEIIGKYGNQNAK |
| | | RLVEKIRLHDEQEGKCLYSLESIPLEDLLNNPNHYEVDHIIPRSVSFDNSYHN |
| | | KVLVKQSEASKKSNLTPYQYFNSGKSKLSYNQFKQHILNLSKSQDRISKKK |
| | | KEYLLEERDINKFEVQKEFINRNLVDTRYATRELTNYLKAYFSANNMNVK |
| | | VKTINGSFTDYLRKVWKFKKERNHGYKHHAEDALIIANADFLFKENKKLK |
| | | AVNSVLEKPEIESKQLDIQVDSEDNYSEMFIIPKQVQDIKDFRNFKYSHRVD |
| | | KKPNRQLINDTLYSTRKKDNSTYIVQTIKDIYAKDNTTLKKQFDKSPEKFL |
| | | MYQHDPRTFEKLEVIMKQYANEKNPLAKYHEETGEYLTKYSKKNNGPIVK |
| | | SLKYIGNKLGSHLDVTHQFKSSTKKLVKLSIKPYRFDVYLTDKGYKFITISY |
| | | LDVLKKDNYYYIPEQKYDKLKLGKAIDKNAKFIASFYKNDLIKLDGEIYKII |
| | | GVNSDTRNMIELDLPDIRYKEYCELNNIKGEPRIKKTIGKKVNSIEKLTTDV |
| | | LGNVFTNTQYTKPQLLFKRGN |
| 1871 | Met (−) | NQKFILGLDIGITSVGYGLIDYETKNIIDAGVRLFPEANVENNEGRRSKRGSR |
| | SluCas9 | RLKRRRIHRLERVKKLLEDYNLLDQSQIPQSTNPYAIRVKGLSEALSKDELV |
| | nickase | IALLHIAKRRGIHKIDVIDSNDDVGNELSTKEQLNKNSKLLKDKFVCQIQLE |
| | | RMNEGQVRGEKNRFKTADIIKEIIQLLNVQKNFHQLDENFINKYIELVEMRR |
| | | EYFEGPGKGSPYGWEGDPKAWYETLMGHCTYFPDELRSVKYAYSADLFN |
| | | ALNDLNNLVIQRDGLSKLEYHEKYHIIENVFKQKKKPTLKQIANEINVNPED |
| | | IKGYRITKSGKPQFTEFKLYHDLKSVLFDQSILENEDVLDQIAEILTIYQDKD |
| | | SIKSKLTELDILLNEEDKENIAQLTGYTGTHRLSLKCIRLVLEEQWYSSRNQ |
| | | MEIFTHLNIKPKKINLTAANKIPKAMIDEFILSPVVKRTFGQAINLINKIIEKY |
| | | GVPEDIIIELARENNSKDKQKFINEMQKKNENTRKRINEIIGKYGNQNAKRL |
| | | VEKIRLHDEQEGKCLYSLESIPLEDLLNNPNHYEVDHIIPRSVSFDNSYHNK |
| | | VLVKQSEASKKSNLTPYQYFNSGKSKLSYNQFKQHILNLSKSQDRISKKKK |
| | | EYLLEERDINKFEVQKEFINRNLVDTRYATRELTNYLKAYFSANNMNVKV |
| | | KTINGSFTDYLRKVWKFKKERNHGYKHHAEDALIIANADFLFKENKKLKA |
| | | VNSVLEKPEIESKQLDIQVDSEDNYSEMFIIPKQVQDIKDFRNFKYSHRVDK |
| | | KPNRQLINDTLYSTRKKDNSTYIVQTIKDIYAKDNTTLKKQFDKSPEKFLM |
| | | YQHDPRTFEKLEVIMKQYANEKNPLAKYHEETGEYLTKYSKKNNGPIVKS |
| | | LKYIGNKLGSHLDVTHQFKSSTKKLVKLSIKPYRFDVYLTDKGYKFITISYL |
| | | DVLKKDNYYYIPEQKYDKLKLGKAIDKNAKFIASFYKNDLIKLDGEIYKIIG |
| | | VNSDTRNMIELDLPDIRYKEYCELNNIKGEPRIKKTIGKKVNSIEKLTTDVL |
| | | GNVFTNTQYTKPQLLFKRGN |
| 1872 | Staphylococcus | MKRNYILGLDIGITSVGYGIIDYETRDVIDAGVRLFKEANVENNEGRRSKRG |
| | aureus | ARRLKRRRRHRIQRVKKLLFDYNLLTDHSELSGINPYEARVKGLSQKLSEE |
| | Cas9 | EFSAALLHLAKRRGVHNVNEVEEDTGNELSTKEQISRNSKALEEKYVAELQ |
| | (SaCas9) | LERLKKDGEVRGSINRFKTSDYVKEAKQLLKVQKAYHQLDQSFIDTYIDLL |
| | | ETRRTYYEGPGEGSPFGWKDIKEWYEMLMGHCTYFPEELRSVKYAYNAD |
| | | LYNALNDLNNLVITRDENEKLEYYEKFQIIENVFKQKKKPTLKQIAKEILVN |
| | | EEDIKGYRVTSTGKPEFTNLKVYHDIKDITARKEIIENAELLDQIAKILTIYQS |
| | | SEDIQEELTNLNSELTQEEIEQISNLKGYTGTHNLSLKAINLILDELWHTNDN |
| | | QIAIFNRLKLVPKKVDLSQQKEIPTTLVDDFILSPVVKRSFIQSIKVINAIIKKY |
| | | GLPNDIIIELAREKNSKDAQKMINEMQKRNRQTNERIEEIIRTTGKENAKYLI |
| | | EKIKLHDMQEGKCLYSLEAIPLEDLLNNPFNYEVDHIIPRSVSFDNSFNNKV |
| | | LVKQEENSKKGNRTPFQYLSSSDSKISYETFKKHILNLAKGKGRISKTKKEY |
| | | LLEERDINRFSVQKDFINRNLVDTRYATRGLMNLLRSYFRVNNLDVKVKSI |
| | | NGGFTSFLRRKWKFKKERNKGYKHHAEDALIIANADFIFKEWKKLDKAKK |
| | | VMENQMFEEKQAESMPEIETEQEYKEIFITPHQIKHIKDFKDYKYSHRVDK |
| | | KPNRELINDTLYSTRKDDKGNTLIVNNLNGLYDKDNDKLKKLINKSPEKLL |
| | | MYHHDPQTYQKLKLIMEQYGDEKNPLYKYYEETGNYLTKYSKKDNGPVI |
| | | KKIKYYGNKLNAHLDITDDYPNSRNKVVKLSLKPYRFDVYLDNGVYKFVT |
| | | VKNLDVIKKENYYEVNSKCYEEAKKLKKISNQAEFIASFYNNDLIKINGEL |
| | | YRVIGVNNDLLNRIEVNMIDITYREYLENMNDKRPPRIIKTIASKTQSIKKYS |
| | | TDILGNLYEVKSKKHPQIIKKG |
| 1873 | SaCas9 | MKRNYILGLDIGITSVGYGIIDYETRDVIDAGVRLFKEANVENNEGRRSKRG |
| | N580A | ARRLKRRRRHRIQRVKKLLFDYNLLTDHSELSGINPYEARVKGLSQKLSEE |
| | nickase | EFSAALLHLAKRRGVHNVNEVEEDTGNELSTKEQISRNSKALEEKYVAELQ |
| | | LERLKKDGEVRGSINRFKTSDYVKEAKQLLKVQKAYHQLDQSFIDTYIDLL |
| | | ETRRTYYEGPGEGSPFGWKDIKEWYEMLMGHCTYFPEELRSVKYAYNAD |
| | | LYNALNDLNNLVITRDENEKLEYYEKFQIIENVFKQKKKPTLKQIAKEILVN |
| | | EEDIKGYRVTSTGKPEFTNLKVYHDIKDITARKEIIENAELLDQIAKILTIYQS |
| | | SEDIQEELTNLNSELTQEEIEQISNLKGYTGTHNLSLKAINLILDELWHTNDN |
| | | QIAIFNRLKLVPKKVDLSQQKEIPTTLVDDFILSPVVKRSFIQSIKVINAIIKKY |
| | | GLPNDIIIELAREKNSKDAQKMINEMQKRNRQTNERIEEIIRTTGKENAKYLI |
| | | EKIKLHDMQEGKCLYSLEAIPLEDLLNNPFNYEVDHIIPRSVSFDNSFNNKV |
| | | LVKQEEASKKGNRTPFQYLSSSDSKISYETFKKHILNLAKGKGRISKTKKEY |
| | | LLEERDINRFSVQKDFINRNLVDTRYATRGLMNLLRSYFRVNNLDVKVKSI |
| | | NGGFTSFLRRKWKFKKERNKGYKHHAEDALIIANADFIFKEWKKLDKAKK |
| | | VMENQMFEEKQAESMPEIETEQEYKEIFITPHQIKHIKDFKDYKYSHRVDK |
| | | KPNRELINDTLYSTRKDDKGNTLIVNNLNGLYDKDNDKLKKLINKSPEKLL |
| | | MYHHDPQTYQKLKLIMEQYGDEKNPLYKYYEETGNYLTKYSKKDNGPVI |
| | | KKIKYYGNKLNAHLDITDDYPNSRNKVVKLSLKPYRFDVYLDNGVYKFVT |
| | | VKNLDVIKKENYYEVNSKCYEEAKKLKKISNQAEFIASFYNNDLIKINGEL |
| | | YRVIGVNNDLLNRIEVNMIDITYREYLENMNDKRPPRIIKTIASKTQSIKKYS |
| | | TDILGNLYEVKSKKHPQIIKKG |
| 1874 | Met (−) | KRNYILGLDIGITSVGYGIIDYETRDVIDAGVRLFKEANVENNEGRRSKRGA |
| | SaCas9 | RRLKRRRRHRIQRVKKLLFDYNLLTDHSELSGINPYEARVKGLSQKLSEEEF |
| | nickase | SAALLHLAKRRGVHNVNEVEEDTGNELSTKEQISRNSKALEEKYVAELQL |
| | | ERLKKDGEVRGSINRFKTSDYVKEAKQLLKVQKAYHQLDQSFIDTYIDLLE |
| | | TRRTYYEGPGEGSPFGWKDIKEWYEMLMGHCTYFPEELRSVKYAYNADL |
| | | YNALNDLNNLVITRDENEKLEYYEKFQIIENVFKQKKKPTLKQIAKEILVNE |
| | | EDIKGYRVTSTGKPEFTNLKVYHDIKDITARKEIIENAELLDQIAKILTIYQSS |
| | | EDIQEELTNLNSELTQEEIEQISNLKGYTGTHNLSLKAINLILDELWHTNDN |
| | | QIAIFNRLKLVPKKVDLSQQKEIPTTLVDDFILSPVVKRSFIQSIKVINAIIKKY |
| | | GLPNDIIIELAREKNSKDAQKMINEMQKRNRQTNERIEEIIRTTGKENAKYLI |
| | | EKIKLHDMQEGKCLYSLEAIPLEDLLNNPFNYEVDHIIPRSVSFDNSFNNKV |
| | | LVKQEEASKKGNRTPFQYLSSSDSKISYETFKKHILNLAKGKGRISKTKKEY |
| | | LLEERDINRFSVQKDFINRNLVDTRYATRGLMNLLRSYFRVNNLDVKVKSI |
| | | NGGFTSFLRRKWKFKKERNKGYKHHAEDALIIANADFIFKEWKKLDKAKK |
| | | VMENQMFEEKQAESMPEIETEQEYKEIFITPHQIKHIKDFKDYKYSHRVDK |
| | | KPNRELINDTLYSTRKDDKGNTLIVNNLNGLYDKDNDKLKKLINKSPEKLL |
| | | MYHHDPQTYQKLKLIMEQYGDEKNPLYKYYEETGNYLTKYSKKDNGPVI |
| | | KKIKYYGNKLNAHLDITDDYPNSRNKVVKLSLKPYRFDVYLDNGVYKFVT |
| | | VKNLDVIKKENYYEVNSKCYEEAKKLKKISNQAEFIASFYNNDLIKINGEL |
| | | YRVIGVNNDLLNRIEVNMIDITYREYLENMNDKRPPRIIKTIASKTQSIKKYS |
| | | TDILGNLYEVKSKKHPQIIKKG |
| 1875 | SpCas9-NG | MDKKYSIGLDIGTNSVGWAVITDEYKVPSKKFKVLGNTDRHSIKKNLIGAL |
| | (VRVRFRR) | LFDSGETAEATRLKRTARRRYTRRKNRICYLQEIFSNEMAKVDDSFFHRLE |
| | | ESFLVEEDKKHERHPIFGNIVDEVAYHEKYPTIYHLRKKLVDSTDKADLRLI |
| | | YLALAHMIKFRGHFLIEGDLNPDNSDVDKLFIQLVQTYNQLFEENPINASGV |
| | | DAKAILSARLSKSRRLENLIAQLPGEKKNGLFGNLIALSLGLTPNFKSNFDL |
| | | AEDAKLQLSKDTYDDDLDNLLAQIGDQYADLFLAAKNLSDAILLSDILRVN |
| | | TEITKAPLSASMIKRYDEHHQDLTLLKALVRQQLPEKYKEIFFDQSKNGYA |
| | | GYIDGGASQEEFYKFIKPILEKMDGTEELLVKLNREDLLRKQRTFDNGSIPH |
| | | QIHLGELHAILRRQEDFYPFLKDNREKIEKILTFRIPYYVGPLARGNSRFAW |
| | | MTRKSEETITPWNFEEVVDKGASAQSFIERMTNFDKNLPNEKVLPKHSLLY |
| | | EYFTVYNELTKVKYVTEGMRKPAFLSGEQKKAIVDLLFKTNRKVTVKQLK |
| | | EDYFKKIECFDSVEISGVEDRFNASLGTYHDLLKIIKDKDFLDNEENEDILED |
| | | IVLTLTLFEDREMIEERLKTYAHLFDDKVMKQLKRRRYTGWGRLSRKLING |
| | | IRDKQSGKTILDFLKSDGFANRNFMQLIHDDSLTFKEDIQKAQVSGQGDSL |
| | | HEHIANLAGSPAIKKGILQTVKVVDELVKVMGRHKPENIVIEMARENQTTQ |
| | | KGQKNSRERMKRIEEGIKELGSQILKEHPVENTQLQNEKLYLYYLQNGRD |
| | | MYVDQELDINRLSDYDVDHIVPQSFLKDDSIDNKVLTRSDKNRGKSDNVPS |
| | | EEVVKKMKNYWRQLLNAKLITQRKFDNLTKAERGGLSELDKAGFIKRQLV |
| | | ETRQITKHVAQILDSRMNTKYDENDKLIREVKVITLKSKLVSDFRKDFQFY |
| | | KVREINNYHHAHDAYLNAVVGTALIKKYPKLESEFVYGDYKVYDVRKMI |
| | | AKSEQEIGKATAKYFFYSNIMNFFKTEITLANGEIRKRPLIETNGETGEIVWD |
| | | KGRDFATVRKVLSMPQVNIVKKTEVQTGGFSKESIRPKRNSDKLIARKKD |
| | | WDPKKYGGFVSPTVAYSVLVVAKVEKGKSKKLKSVKELLGITIMERSSFE |
| | | KNPIDFLEAKGYKEVKKDLIIKLPKYSLFELENGRKRMLASARFLQKGNEL |
| | | ALPSKYVNFLYLASHYEKLKGSPEDNEQKQLFVEQHKHYLDEIIEQISEFSK |
| | | RVILADANLDKVLSAYNKHRDKPIREQAENIIHLFTLTNLGAPRAFKYFDTT |
| | | IDRKVYRSTKEVLDATLIHQSITGLYETRIDLSQLGGD |
| 1876 | spCas9-NG | MDKKYSIGLDIGTNSVGWAVITDEYKVPSKKFKVLGNTDRHSIKKNLIGAL |
| | (H840A_ | LFDSGETAEATRLKRTARRRYTRRKNRICYLQEIFSNEMAKVDDSFFHRLE |
| | VRVRFRR) | ESFLVEEDKKHERHPIFGNIVDEVAYHEKYPTIYHLRKKLVDSTDKADLRLI |
| | Nickase | YLALAHMIKFRGHFLIEGDLNPDNSDVDKLFIQLVQTYNQLFEENPINASGV |
| | | DAKAILSARLSKSRRLENLIAQLPGEKKNGLFGNLIALSLGLTPNFKSNFDL |
| | | AEDAKLQLSKDTYDDDLDNLLAQIGDQYADLFLAAKNLSDAILLSDILRVN |
| | | TEITKAPLSASMIKRYDEHHQDLTLLKALVRQQLPEKYKEIFFDQSKNGYA |
| | | GYIDGGASQEEFYKFIKPILEKMDGTEELLVKLNREDLLRKQRTFDNGSIPH |
| | | QIHLGELHAILRRQEDFYPFLKDNREKIEKILTFRIPYYVGPLARGNSRFAW |
| | | MTRKSEETITPWNFEEVVDKGASAQSFIERMTNFDKNLPNEKVLPKHSLLY |
| | | EYFTVYNELTKVKYVTEGMRKPAFLSGEQKKAIVDLLFKTNRKVTVKQLK |
| | | EDYFKKIECFDSVEISGVEDRFNASLGTYHDLLKIIKDKDFLDNEENEDILED |
| | | IVLTLTLFEDREMIEERLKTYAHLFDDKVMKQLKRRRYTGWGRLSRKLING |
| | | IRDKQSGKTILDFLKSDGFANRNFMQLIHDDSLTFKEDIQKAQVSGQGDSL |
| | | HEHIANLAGSPAIKKGILQTVKVVDELVKVMGRHKPENIVIEMARENQTTQ |
| | | KGQKNSRERMKRIEEGIKELGSQILKEHPVENTQLQNEKLYLYYLQNGRD |
| | | MYVDQELDINRLSDYDVDAIVPQSFLKDDSIDNKVLTRSDKNRGKSDNVPS |
| | | EEVVKKMKNYWRQLLNAKLITQRKFDNLTKAERGGLSELDKAGFIKRQLV |
| | | ETRQITKHVAQILDSRMNTKYDENDKLIREVKVITLKSKLVSDFRKDFQFY |
| | | KVREINNYHHAHDAYLNAVVGTALIKKYPKLESEFVYGDYKVYDVRKMI |
| | | AKSEQEIGKATAKYFFYSNIMNFFKTEITLANGEIRKRPLIETNGETGEIVWD |
| | | KGRDFATVRKVLSMPQVNIVKKTEVQTGGFSKESIRPKRNSDKLIARKKD |
| | | WDPKKYGGFVSPTVAYSVLVVAKVEKGKSKKLKSVKELLGITIMERSSFE |
| | | KNPIDFLEAKGYKEVKKDLIIKLPKYSLFELENGRKRMLASARFLQKGNEL |
| | | ALPSKYVNFLYLASHYEKLKGSPEDNEQKQLFVEQHKHYLDEIIEQISEFSK |
| | | RVILADANLDKVLSAYNKHRDKPIREQAENIIHLFTLTNLGAPRAFKYFDTT |
| | | IDRKVYRSTKEVLDATLIHQSITGLYETRIDLSQLGGD |
| 1877 | Met (−) | DKKYSIGLDIGTNSVGWAVITDEYKVPSKKFKVLGNTDRHSIKKNLIGALL |
| | SpCas9-NG | FDSGETAEATRLKRTARRRYTRRKNRICYLQEIFSNEMAKVDDSFFHRLEE |
| | Nickase | SFLVEEDKKHERHPIFGNIVDEVAYHEKYPTIYHLRKKLVDSTDKADLRLIY |
| | | LALAHMIKFRGHFLIEGDLNPDNSDVDKLFIQLVQTYNQLFEENPINASGVD |
| | | AKAILSARLSKSRRLENLIAQLPGEKKNGLFGNLIALSLGLTPNFKSNFDLA |
| | | EDAKLQLSKDTYDDDLDNLLAQIGDQYADLFLAAKNLSDAILLSDILRVNT |
| | | EITKAPLSASMIKRYDEHHQDLTLLKALVRQQLPEKYKEIFFDQSKNGYAG |
| | | YIDGGASQEEFYKFIKPILEKMDGTEELLVKLNREDLLRKQRTFDNGSIPHQ |
| | | IHLGELHAILRRQEDFYPFLKDNREKIEKILTFRIPYYVGPLARGNSRFAWM |
| | | TRKSEETITPWNFEEVVDKGASAQSFIERMTNFDKNLPNEKVLPKHSLLYE |
| | | YFTVYNELTKVKYVTEGMRKPAFLSGEQKKAIVDLLFKTNRKVTVKQLKE |
| | | DYFKKIECFDSVEISGVEDRFNASLGTYHDLLKIIKDKDFLDNEENEDILEDI |
| | | VLTLTLFEDREMIEERLKTYAHLFDDKVMKQLKRRRYTGWGRLSRKLINGI |
| | | RDKQSGKTILDFLKSDGFANRNFMQLIHDDSLTFKEDIQKAQVSGQGDSLH |
| | | EHIANLAGSPAIKKGILQTVKVVDELVKVMGRHKPENIVIEMARENQTTQK |
| | | GQKNSRERMKRIEEGIKELGSQILKEHPVENTQLQNEKLYLYYLQNGRDM |
| | | YVDQELDINRLSDYDVDAIVPQSFLKDDSIDNKVLTRSDKNRGKSDNVPSE |
| | | EVVKKMKNYWRQLLNAKLITQRKFDNLTKAERGGLSELDKAGFIKRQLVE |
| | | TRQITKHVAQILDSRMNTKYDENDKLIREVKVITLKSKLVSDFRKDFQFYK |
| | | VREINNYHHAHDAYLNAVVGTALIKKYPKLESEFVYGDYKVYDVRKMIA |
| | | KSEQEIGKATAKYFFYSNIMNFFKTEITLANGEIRKRPLIETNGETGEIVWDK |
| | | GRDFATVRKVLSMPQVNIVKKTEVQTGGFSKESIRPKRNSDKLIARKKDW |
| | | DPKKYGGFVSPTVAYSVLVVAKVEKGKSKKLKSVKELLGITIMERSSFEKN |
| | | PIDFLEAKGYKEVKKDLIIKLPKYSLFELENGRKRMLASARFLQKGNELALP |
| | | SKYVNFLYLASHYEKLKGSPEDNEQKQLFVEQHKHYLDEIIEQISEFSKRVI |
| | | LADANLDKVLSAYNKHRDKPIREQAENIIHLFTLTNLGAPRAFKYFDTTIDR |
| | | KVYRSTKEVLDATLIHQSITGLYETRIDLSQLGGD |
| 1878 | spCas9-NGA | MDKKYSIGLDIGTNSVGWAVITDEYKVPSKKFKVLGNTDRHSIKKNLIGAL |
| | (VRQR) | LFDSGETAEATRLKRTARRRYTRRKNRICYLQEIFSNEMAKVDDSFFHRLE |
| | | ESFLVEEDKKHERHPIFGNIVDEVAYHEKYPTIYHLRKKLVDSTDKADLRLI |
| | | YLALAHMIKFRGHFLIEGDLNPDNSDVDKLFIQLVQTYNQLFEENPINASGV |
| | | DAKAILSARLSKSRRLENLIAQLPGEKKNGLFGNLIALSLGLTPNFKSNFDL |
| | | AEDAKLQLSKDTYDDDLDNLLAQIGDQYADLFLAAKNLSDAILLSDILRVN |
| | | TEITKAPLSASMIKRYDEHHQDLTLLKALVRQQLPEKYKEIFFDQSKNGYA |
| | | GYIDGGASQEEFYKFIKPILEKMDGTEELLVKLNREDLLRKQRTFDNGSIPH |
| | | QIHLGELHAILRRQEDFYPFLKDNREKIEKILTFRIPYYVGPLARGNSRFAW |
| | | MTRKSEETITPWNFEEVVDKGASAQSFIERMTNFDKNLPNEKVLPKHSLLY |
| | | EYFTVYNELTKVKYVTEGMRKPAFLSGEQKKAIVDLLFKTNRKVTVKQLK |
| | | EDYFKKIECFDSVEISGVEDRFNASLGTYHDLLKIIKDKDFLDNEENEDILED |
| | | IVLTLTLFEDREMIEERLKTYAHLFDDKVMKQLKRRRYTGWGRLSRKLING |
| | | IRDKQSGKTILDFLKSDGFANRNFMQLIHDDSLTFKEDIQKAQVSGQGDSL |
| | | HEHIANLAGSPAIKKGILQTVKVVDELVKVMGRHKPENIVIEMARENQTTQ |
| | | KGQKNSRERMKRIEEGIKELGSQILKEHPVENTQLQNEKLYLYYLQNGRD |
| | | MYVDQELDINRLSDYDVDHIVPQSFLKDDSIDNKVLTRSDKNRGKSDNVPS |
| | | EEVVKKMKNYWRQLLNAKLITQRKFDNLTKAERGGLSELDKAGFIKRQLV |
| | | ETRQITKHVAQILDSRMNTKYDENDKLIREVKVITLKSKLVSDFRKDFQFY |
| | | KVREINNYHHAHDAYLNAVVGTALIKKYPKLESEFVYGDYKVYDVRKMI |
| | | AKSEQEIGKATAKYFFYSNIMNFFKTEITLANGEIRKRPLIETNGETGEIVWD |
| | | KGRDFATVRKVLSMPQVNIVKKTEVQTGGFSKESILPKRNSDKLIARKKD |
| | | WDPKKYGGFVSPTVAYSVLVVAKVEKGKSKKLKSVKELLGITIMERSSFE |
| | | KNPIDFLEAKGYKEVKKDLIIKLPKYSLFELENGRKRMLASARELQKGNEL |
| | | ALPSKYVNFLYLASHYEKLKGSPEDNEQKQLFVEQHKHYLDEIIEQISEFSK |
| | | RVILADANLDKVLSAYNKHRDKPIREQAENIIHLFTLTNLGAPAAFKYFDTT |
| | | IDRKQYRSTKEVLDATLIHQSITGLYETRIDLSQLGGD |
| 1879 | spCas9-NGA | MDKKYSIGLDIGTNSVGWAVITDEYKVPSKKFKVLGNTDRHSIKKNLIGAL |
| | (H840A_ | LFDSGETAEATRLKRTARRRYTRRKNRICYLQEIFSNEMAKVDDSFFHRLE |
| | VRQR) Nickase | ESFLVEEDKKHERHPIFGNIVDEVAYHEKYPTIYHLRKKLVDSTDKADLRLI |
| | | YLALAHMIKFRGHFLIEGDLNPDNSDVDKLFIQLVQTYNQLFEENPINASGV |
| | | DAKAILSARLSKSRRLENLIAQLPGEKKNGLFGNLIALSLGLTPNFKSNFDL |
| | | AEDAKLQLSKDTYDDDLDNLLAQIGDQYADLFLAAKNLSDAILLSDILRVN |
| | | TEITKAPLSASMIKRYDEHHQDLTLLKALVRQQLPEKYKEIFFDQSKNGYA |
| | | GYIDGGASQEEFYKFIKPILEKMDGTEELLVKLNREDLLRKQRTFDNGSIPH |
| | | QIHLGELHAILRRQEDFYPFLKDNREKIEKILTFRIPYYVGPLARGNSRFAW |
| | | MTRKSEETITPWNFEEVVDKGASAQSFIERMTNFDKNLPNEKVLPKHSLLY |
| | | EYFTVYNELTKVKYVTEGMRKPAFLSGEQKKAIVDLLFKTNRKVTVKQLK |
| | | EDYFKKIECFDSVEISGVEDRFNASLGTYHDLLKIIKDKDFLDNEENEDILED |
| | | IVLTLTLFEDREMIEERLKTYAHLFDDKVMKQLKRRRYTGWGRLSRKLING |
| | | IRDKQSGKTILDFLKSDGFANRNFMQLIHDDSLTFKEDIQKAQVSGQGDSL |
| | | HEHIANLAGSPAIKKGILQTVKVVDELVKVMGRHKPENIVIEMARENQTTQ |
| | | KGQKNSRERMKRIEEGIKELGSQILKEHPVENTQLQNEKLYLYYLQNGRD |
| | | MYVDQELDINRLSDYDVDAIVPQSFLKDDSIDNKVLTRSDKNRGKSDNVPS |
| | | EEVVKKMKNYWRQLLNAKLITQRKFDNLTKAERGGLSELDKAGFIKRQLV |
| | | ETRQITKHVAQILDSRMNTKYDENDKLIREVKVITLKSKLVSDFRKDFQFY |
| | | KVREINNYHHAHDAYLNAVVGTALIKKYPKLESEFVYGDYKVYDVRKMI |
| | | AKSEQEIGKATAKYFFYSNIMNFFKTEITLANGEIRKRPLIETNGETGEIVWD |
| | | KGRDFATVRKVLSMPQVNIVKKTEVQTGGFSKESILPKRNSDKLIARKKD |
| | | WDPKKYGGFVSPTVAYSVLVVAKVEKGKSKKLKSVKELLGITIMERSSFE |
| | | KNPIDFLEAKGYKEVKKDLIIKLPKYSLFELENGRKRMLASARELQKGNEL |
| | | ALPSKYVNFLYLASHYEKLKGSPEDNEQKQLFVEQHKHYLDEIIEQISEFSK |
| | | RVILADANLDKVLSAYNKHRDKPIREQAENIIHLFTLTNLGAPAAFKYFDTT |
| | | IDRKQYRSTKEVLDATLIHQSITGLYETRIDLSQLGGD |
| 1880 | Met(−) | DKKYSIGLDIGTNSVGWAVITDEYKVPSKKFKVLGNTDRHSIKKNLIGALL |
| | spCas9-NGA | FDSGETAEATRLKRTARRRYTRRKNRICYLQEIFSNEMAKVDDSFFHRLEE |
| | Nickase | SFLVEEDKKHERHPIFGNIVDEVAYHEKYPTIYHLRKKLVDSTDKADLRLIY |
| | | LALAHMIKFRGHFLIEGDLNPDNSDVDKLFIQLVQTYNQLFEENPINASGVD |
| | | AKAILSARLSKSRRLENLIAQLPGEKKNGLFGNLIALSLGLTPNFKSNFDLA |
| | | EDAKLQLSKDTYDDDLDNLLAQIGDQYADLFLAAKNLSDAILLSDILRVNT |
| | | EITKAPLSASMIKRYDEHHQDLTLLKALVRQQLPEKYKEIFFDQSKNGYAG |
| | | YIDGGASQEEFYKFIKPILEKMDGTEELLVKLNREDLLRKQRTFDNGSIPHQ |
| | | IHLGELHAILRRQEDFYPFLKDNREKIEKILTFRIPYYVGPLARGNSRFAWM |
| | | TRKSEETITPWNFEEVVDKGASAQSFIERMTNFDKNLPNEKVLPKHSLLYE |
| | | YFTVYNELTKVKYVTEGMRKPAFLSGEQKKAIVDLLFKTNRKVTVKQLKE |
| | | DYFKKIECFDSVEISGVEDRFNASLGTYHDLLKIIKDKDFLDNEENEDILEDI |
| | | VLTLTLFEDREMIEERLKTYAHLFDDKVMKQLKRRRYTGWGRLSRKLINGI |
| | | RDKQSGKTILDFLKSDGFANRNFMQLIHDDSLTFKEDIQKAQVSGQGDSLH |
| | | EHIANLAGSPAIKKGILQTVKVVDELVKVMGRHKPENIVIEMARENQTTQK |
| | | GQKNSRERMKRIEEGIKELGSQILKEHPVENTQLQNEKLYLYYLQNGRDM |
| | | YVDQELDINRLSDYDVDAIVPQSFLKDDSIDNKVLTRSDKNRGKSDNVPSE |
| | | EVVKKMKNYWRQLLNAKLITQRKFDNLTKAERGGLSELDKAGFIKRQLVE |
| | | TRQITKHVAQILDSRMNTKYDENDKLIREVKVITLKSKLVSDFRKDFQFYK |
| | | VREINNYHHAHDAYLNAVVGTALIKKYPKLESEFVYGDYKVYDVRKMIA |
| | | KSEQEIGKATAKYFFYSNIMNFFKTEITLANGEIRKRPLIETNGETGEIVWDK |
| | | GRDFATVRKVLSMPQVNIVKKTEVQTGGFSKESILPKRNSDKLIARKKDW |
| | | DPKKYGGFVSPTVAYSVLVVAKVEKGKSKKLKSVKELLGITIMERSSFEKN |
| | | PIDFLEAKGYKEVKKDLIIKLPKYSLFELENGRKRMLASARELQKGNELALP |
| | | SKYVNFLYLASHYEKLKGSPEDNEQKQLFVEQHKHYLDEIIEQISEFSKRVI |
| | | LADANLDKVLSAYNKHRDKPIREQAENIIHLFTLTNLGAPAAFKYFDTTIDR |
| | | KQYRSTKEVLDATLIHQSITGLYETRIDLSQLGGD |
| 1881 | SpRY Cas9 | MDKKYSIGLDIGTNSVGWAVITDEYKVPSKKFKVLGNTDRHSIKKNLIGAL |
| | | LFDSGETAERTRLKRTARRRYTRRKNRICYLQEIFSNEMAKVDDSFFHRLE |
| | | ESFLVEEDKKHERHPIFGNIVDEVAYHEKYPTIYHLRKKLVDSTDKADLRLI |
| | | YLALAHMIKFRGHFLIEGDLNPDNSDVDKLFIQLVQTYNQLFEENPINASGV |
| | | DAKAILSARLSKSRRLENLIAQLPGEKKNGLFGNLIALSLGLTPNFKSNFDL |
| | | AEDAKLQLSKDTYDDDLDNLLAQIGDQYADLFLAAKNLSDAILLSDILRVN |
| | | TEITKAPLSASMIKRYDEHHQDLTLLKALVRQQLPEKYKEIFFDQSKNGYA |
| | | GYIDGGASQEEFYKFIKPILEKMDGTEELLVKLNREDLLRKQRTFDNGSIPH |
| | | QIHLGELHAILRRQEDFYPFLKDNREKIEKILTFRIPYYVGPLARGNSRFAW |
| | | MTRKSEETITPWNFEEVVDKGASAQSFIERMTNFDKNLPNEKVLPKHSLLY |
| | | EYFTVYNELTKVKYVTEGMRKPAFLSGEQKKAIVDLLFKTNRKVTVKQLK |
| | | EDYFKKIECFDSVEISGVEDRFNASLGTYHDLLKIIKDKDFLDNEENEDILED |
| | | IVLTLTLFEDREMIEERLKTYAHLFDDKVMKQLKRRRYTGWGRLSRKLING |
| | | IRDKQSGKTILDFLKSDGFANRNFMQLIHDDSLTFKEDIQKAQVSGQGDSL |
| | | HEHIANLAGSPAIKKGILQTVKVVDELVKVMGRHKPENIVIEMARENQTTQ |
| | | KGQKNSRERMKRIEEGIKELGSQILKEHPVENTQLQNEKLYLYYLQNGRD |
| | | MYVDQELDINRLSDYDVDHIVPQSFLKDDSIDNKVLTRSDKNRGKSDNVPS |
| | | EEVVKKMKNYWRQLLNAKLITQRKFDNLTKAERGGLSELDKAGFIKRQLV |
| | | ETRQITKHVAQILDSRMNTKYDENDKLIREVKVITLKSKLVSDFRKDFQFY |
| | | KVREINNYHHAHDAYLNAVVGTALIKKYPKLESEFVYGDYKVYDVRKMI |
| | | AKSEQEIGKATAKYFFYSNIMNFFKTEITLANGEIRKRPLIETNGETGEIVWD |
| | | KGRDFATVRKVLSMPQVNIVKKTEVQTGGFSKESIRPKRNSDKLIARKKD |
| | | WDPKKYGGFLWPTVAYSVLVVAKVEKGKSKKLKSVKELLGITIMERSSFE |
| | | KNPIDFLEAKGYKEVKKDLIIKLPKYSLFELENGRKRMLASAKQLQKGNEL |
| | | ALPSKYVNFLYLASHYEKLKGSPEDNEQKQLFVEQHKHYLDEIIEQISEFSK |
| | | RVILADANLDKVLSAYNKHRDKPIREQAENIIHLFTLTRLGAPRAFKYFDTT |
| | | IDPKQYRSTKEVLDATLIHQSITGLYETRIDLSQLGGD |
| 1882 | SpRY Cas9 | MDKKYSIGLDIGTNSVGWAVITDEYKVPSKKFKVLGNTDRHSIKKNLIGAL |
| | (H840A) | LFDSGETAERTRLKRTARRRYTRRKNRICYLQEIFSNEMAKVDDSFFHRLE |
| | Nickase | ESFLVEEDKKHERHPIFGNIVDEVAYHEKYPTIYHLRKKLVDSTDKADLRLI |
| | | YLALAHMIKFRGHFLIEGDLNPDNSDVDKLFIQLVQTYNQLFEENPINASGV |
| | | DAKAILSARLSKSRRLENLIAQLPGEKKNGLFGNLIALSLGLTPNFKSNFDL |
| | | AEDAKLQLSKDTYDDDLDNLLAQIGDQYADLFLAAKNLSDAILLSDILRVN |
| | | TEITKAPLSASMIKRYDEHHQDLTLLKALVRQQLPEKYKEIFFDQSKNGYA |
| | | GYIDGGASQEEFYKFIKPILEKMDGTEELLVKLNREDLLRKQRTFDNGSIPH |
| | | QIHLGELHAILRRQEDFYPFLKDNREKIEKILTFRIPYYVGPLARGNSRFAW |
| | | MTRKSEETITPWNFEEVVDKGASAQSFIERMTNFDKNLPNEKVLPKHSLLY |
| | | EYFTVYNELTKVKYVTEGMRKPAFLSGEQKKAIVDLLFKTNRKVTVKQLK |
| | | EDYFKKIECFDSVEISGVEDRFNASLGTYHDLLKIIKDKDFLDNEENEDILED |
| | | IVLTLTLFEDREMIEERLKTYAHLFDDKVMKQLKRRRYTGWGRLSRKLING |
| | | IRDKQSGKTILDFLKSDGFANRNFMQLIHDDSLTFKEDIQKAQVSGQGDSL |
| | | HEHIANLAGSPAIKKGILQTVKVVDELVKVMGRHKPENIVIEMARENQTTQ |
| | | KGQKNSRERMKRIEEGIKELGSQILKEHPVENTQLQNEKLYLYYLQNGRD |
| | | MYVDQELDINRLSDYDVDAIVPQSFLKDDSIDNKVLTRSDKNRGKSDNVPS |
| | | EEVVKKMKNYWRQLLNAKLITQRKFDNLTKAERGGLSELDKAGFIKRQLV |
| | | ETRQITKHVAQILDSRMNTKYDENDKLIREVKVITLKSKLVSDFRKDFQFY |
| | | KVREINNYHHAHDAYLNAVVGTALIKKYPKLESEFVYGDYKVYDVRKMI |
| | | AKSEQEIGKATAKYFFYSNIMNFFKTEITLANGEIRKRPLIETNGETGEIVWD |
| | | KGRDFATVRKVLSMPQVNIVKKTEVQTGGFSKESIRPKRNSDKLIARKKD |
| | | WDPKKYGGFLWPTVAYSVLVVAKVEKGKSKKLKSVKELLGITIMERSSFE |
| | | KNPIDFLEAKGYKEVKKDLIIKLPKYSLFELENGRKRMLASAKQLQKGNEL |
| | | ALPSKYVNFLYLASHYEKLKGSPEDNEQKQLFVEQHKHYLDEIIEQISEFSK |
| | | RVILADANLDKVLSAYNKHRDKPIREQAENIIHLFTLTRLGAPRAFKYFDTT |
| | | IDPKQYRSTKEVLDATLIHQSITGLYETRIDLSQLGGD |
| 1883 | Met(−) SpRY | DKKYSIGLDIGTNSVGWAVITDEYKVPSKKFKVLGNTDRHSIKKNLIGALL |
| | Cas9 Nickase | FDSGETAERTRLKRTARRRYTRRKNRICYLQEIFSNEMAKVDDSFFHRLEES |
| | | FLVEEDKKHERHPIFGNIVDEVAYHEKYPTIYHLRKKLVDSTDKADLRLIYL |
| | | ALAHMIKFRGHFLIEGDLNPDNSDVDKLFIQLVQTYNQLFEENPINASGVD |
| | | AKAILSARLSKSRRLENLIAQLPGEKKNGLFGNLIALSLGLTPNFKSNFDLA |
| | | EDAKLQLSKDTYDDDLDNLLAQIGDQYADLFLAAKNLSDAILLSDILRVNT |
| | | EITKAPLSASMIKRYDEHHQDLTLLKALVRQQLPEKYKEIFFDQSKNGYAG |
| | | YIDGGASQEEFYKFIKPILEKMDGTEELLVKLNREDLLRKQRTFDNGSIPHQ |
| | | IHLGELHAILRRQEDFYPFLKDNREKIEKILTFRIPYYVGPLARGNSRFAWM |
| | | TRKSEETITPWNFEEVVDKGASAQSFIERMTNFDKNLPNEKVLPKHSLLYE |
| | | YFTVYNELTKVKYVTEGMRKPAFLSGEQKKAIVDLLFKTNRKVTVKQLKE |
| | | DYFKKIECFDSVEISGVEDRFNASLGTYHDLLKIIKDKDFLDNEENEDILEDI |
| | | VLTLTLFEDREMIEERLKTYAHLFDDKVMKQLKRRRYTGWGRLSRKLINGI |
| | | RDKQSGKTILDFLKSDGFANRNFMQLIHDDSLTFKEDIQKAQVSGQGDSLH |
| | | EHIANLAGSPAIKKGILQTVKVVDELVKVMGRHKPENIVIEMARENQTTQK |
| | | GQKNSRERMKRIEEGIKELGSQILKEHPVENTQLQNEKLYLYYLQNGRDM |
| | | YVDQELDINRLSDYDVDAIVPQSFLKDDSIDNKVLTRSDKNRGKSDNVPSE |
| | | EVVKKMKNYWRQLLNAKLITQRKFDNLTKAERGGLSELDKAGFIKRQLVE |
| | | TRQITKHVAQILDSRMNTKYDENDKLIREVKVITLKSKLVSDFRKDFQFYK |
| | | VREINNYHHAHDAYLNAVVGTALIKKYPKLESEFVYGDYKVYDVRKMIA |
| | | KSEQEIGKATAKYFFYSNIMNFFKTEITLANGEIRKRPLIETNGETGEIVWDK |
| | | GRDFATVRKVLSMPQVNIVKKTEVQTGGFSKESIRPKRNSDKLIARKKDW |
| | | DPKKYGGFLWPTVAYSVLVVAKVEKGKSKKLKSVKELLGITIMERSSFEK |
| | | NPIDFLEAKGYKEVKKDLIIKLPKYSLFELENGRKRMLASAKQLQKGNELA |
| | | LPSKYVNFLYLASHYEKLKGSPEDNEQKQLFVEQHKHYLDEIIEQISEFSKR |
| | | VILADANLDKVLSAYNKHRDKPIREQAENIIHLFTLTRLGAPRAFKYFDTTI |
| | | DPKQYRSTKEVLDATLIHQSITGLYETRIDLSQLGGD |
| 1884 | SRGN3.1 | MNQKFILGLDIGITSVGYGLIDYETKNIIDAGVRLFPEANVENNEGRRSKRG |
| | | SRRLKRRRIHRLERVKLLLTEYDLINKEQIPTSNNPYQIRVKGLSEILSKDEL |
| | | AIALLHLAKRRGIHNVDVAADKEETASDSLSTKDQINKNAKFLESRYVCEL |
| | | QKERLENEGHVRGVENRFLTKDIVREAKKIIDTQMQYYPEIDETFKEKYISL |
| | | VETRREYFEGPGQGSPFGWNGDLKKWYEMLMGHCTYFPQELRSVKYAYS |
| | | ADLFNALNDLNNLIIQRDNSEKLEYHEKYHIIENVFKQKKKPTLKQIAKEIG |
| | | VNPEDIKGYRITKSGTPEFTSFKLFHDLKKVVKDHAILDDIDLLNQIAEILTI |
| | | YQDKDSIVAELGQLEYLMSEADKQSISELTGYTGTHSLSLKCMNMIIDELW |
| | | HSSMNQMEVFTYLNMRPKKYELKGYQRIPTDMIDDAILSPVVKRTFIQSIN |
| | | VINKVIEKYGIPEDIIIELARENNSDDRKKFINNLQKKNEATRKRINEIIGQTG |
| | | NQNAKRIVEKIRLHDQQEGKCLYSLESIPLEDLLNNPNHYEVDHIIPRSVSFD |
| | | NSYHNKVLVKQSENSKKSNLTPYQYFNSGKSKLSYNQFKQHILNLSKSQD |
| | | RISKKKKEYLLEERDINKFEVQKEFINRNLVDTRYATRELTNYLKAYFSAN |
| | | NMNVKVKTINGSFTDYLRKVWKFKKERNHGYKHHAEDALIIANADFLFKE |
| | | NKKLKAVNSVLEKPEIETKQLDIQVDSEDNYSEMFIIPKQVQDIKDFRNFKY |
| | | SHRVDKKPNRQLINDTLYSTRKKDNSTYIVQTIKDIYAKDNTTLKKQFDKS |
| | | PEKFLMYQHDPRTFEKLEVIMKQYANEKNPLAKYHEETGEYLTKYSKKNN |
| | | GPIVKSLKYIGNKLGSHLDVTHQFKSSTKKLVKLSIKNYRFDVYLTEKGYK |
| | | FVTIAYLNVFKKDNYYYIPKDKYQELKEKKKIKDTDQFIASFYKNDLIKLN |
| | | GDLYKIIGVNSDDRNIIELDYYDIKYKDYCEINNIKGEPRIKKTIGKKTESIEK |
| | | FTTDVLGNLYLHSTEKAPQLIFKRGL |
| 1885 | sRGN3.1 | MNQKFILGLDIGITSVGYGLIDYETKNIIDAGVRLFPEANVENNEGRRSKRG |
| | (N585A) | SRRLKRRRIHRLERVKLLLTEYDLINKEQIPTSNNPYQIRVKGLSEILSKDEL |
| | Nickase | AIALLHLAKRRGIHNVDVAADKEETASDSLSTKDQINKNAKFLESRYVCEL |
| | | QKERLENEGHVRGVENRFLTKDIVREAKKIIDTQMQYYPEIDETFKEKYISL |
| | | VETRREYFEGPGQGSPFGWNGDLKKWYEMLMGHCTYFPQELRSVKYAYS |
| | | ADLFNALNDLNNLIIQRDNSEKLEYHEKYHIIENVFKQKKKPTLKQIAKEIG |
| | | VNPEDIKGYRITKSGTPEFTSFKLFHDLKKVVKDHAILDDIDLLNQIAEILTI |
| | | YQDKDSIVAELGQLEYLMSEADKQSISELTGYTGTHSLSLKCMNMIIDELW |
| | | HSSMNQMEVFTYLNMRPKKYELKGYQRIPTDMIDDAILSPVVKRTFIQSIN |
| | | VINKVIEKYGIPEDIIIELARENNSDDRKKFINNLQKKNEATRKRINEIIGQTG |
| | | NQNAKRIVEKIRLHDQQEGKCLYSLESIPLEDLLNNPNHYEVDHIIPRSVSFD |
| | | NSYHNKVLVKQSEASKKSNLTPYQYFNSGKSKLSYNQFKQHILNLSKSQD |
| | | RISKKKKEYLLEERDINKFEVQKEFINRNLVDTRYATRELTNYLKAYFSAN |
| | | NMNVKVKTINGSFTDYLRKVWKFKKERNHGYKHHAEDALIIANADFLFKE |
| | | NKKLKAVNSVLEKPEIETKQLDIQVDSEDNYSEMFIIPKQVQDIKDFRNFKY |
| | | SHRVDKKPNRQLINDTLYSTRKKDNSTYIVQTIKDIYAKDNTTLKKQFDKS |
| | | PEKFLMYQHDPRTFEKLEVIMKQYANEKNPLAKYHEETGEYLTKYSKKNN |
| | | GPIVKSLKYIGNKLGSHLDVTHQFKSSTKKLVKLSIKNYRFDVYLTEKGYK |
| | | FVTIAYLNVFKKDNYYYIPKDKYQELKEKKKIKDTDQFIASFYKNDLIKLN |
| | | GDLYKIIGVNSDDRNIIELDYYDIKYKDYCEINNIKGEPRIKKTIGKKTESIEK |
| | | FTTDVLGNLYLHSTEKAPQLIFKRGL |
| 1886 | Met (−) | NQKFILGLDIGITSVGYGLIDYETKNIIDAGVRLFPEANVENNEGRRSKRGSR |
| | sRGN3.1 | RLKRRRIHRLERVKLLLTEYDLINKEQIPTSNNPYQIRVKGLSEILSKDELAI |
| | (N584A) | ALLHLAKRRGIHNVDVAADKEETASDSLSTKDQINKNAKFLESRYVCELQ |
| | Nickase | KERLENEGHVRGVENRFLTKDIVREAKKIIDTQMQYYPEIDETFKEKYISLV |
| | | ETRREYFEGPGQGSPFGWNGDLKKWYEMLMGHCTYFPQELRSVKYAYSA |
| | | DLFNALNDLNNLIIQRDNSEKLEYHEKYHIIENVFKQKKKPTLKQIAKEIGV |
| | | NPEDIKGYRITKSGTPEFTSFKLFHDLKKVVKDHAILDDIDLLNQIAEILTIY |
| | | QDKDSIVAELGQLEYLMSEADKQSISELTGYTGTHSLSLKCMNMIIDELWH |
| | | SSMNQMEVFTYLNMRPKKYELKGYQRIPTDMIDDAILSPVVKRTFIQSINVI |
| | | NKVIEKYGIPEDIIIELARENNSDDRKKFINNLQKKNEATRKRINEIIGQTGN |
| | | QNAKRIVEKIRLHDQQEGKCLYSLESIPLEDLLNNPNHYEVDHIIPRSVSFDN |
| | | SYHNKVLVKQSEASKKSNLTPYQYFNSGKSKLSYNQFKQHILNLSKSQDRI |
| | | SKKKKEYLLEERDINKFEVQKEFINRNLVDTRYATRELTNYLKAYFSANN |
| | | MNVKVKTINGSFTDYLRKVWKFKKERNHGYKHHAEDALIIANADFLFKEN |
| | | KKLKAVNSVLEKPEIETKQLDIQVDSEDNYSEMFIIPKQVQDIKDFRNFKYS |
| | | HRVDKKPNRQLINDTLYSTRKKDNSTYIVQTIKDIYAKDNTTLKKQFDKSP |
| | | EKFLMYQHDPRTFEKLEVIMKQYANEKNPLAKYHEETGEYLTKYSKKNN |
| | | GPIVKSLKYIGNKLGSHLDVTHQFKSSTKKLVKLSIKNYRFDVYLTEKGYK |
| | | FVTIAYLNVFKKDNYYYIPKDKYQELKEKKKIKDTDQFIASFYKNDLIKLN |
| | | GDLYKIIGVNSDDRNIIELDYYDIKYKDYCEINNIKGEPRIKKTIGKKTESIEK |
| | | FTTDVLGNLYLHSTEKAPQLIFKRGL |
| 1887 | SRGN3.3 | MNQKFILGLDIGITSVGYGLIDYETKNIIDAGVRLFPEANVENNEGRRSKRG |
| | | SRRLKRRRIHRLERVKLLLTEYDLINKEQIPTSNNPYQIRVKGLSEILSKDEL |
| | | AIALLHLAKRRGIHNVDVAADKEETASDSLSTKDQINKNAKFLESRYVCEL |
| | | QKERLENEGHVRGVENRFLTKDIVREAKKIIDTQMQYYPEIDETFKEKYISL |
| | | VETRREYFEGPGQGSPFGWNGDLKKWYEMLMGHCTYFPQELRSVKYAYS |
| | | ADLFNALNDLNNLIIQRDNSEKLEYHEKYHIIENVFKQKKKPTLKQIAKEIG |
| | | VNPEDIKGYRITKSGTPEFTSFKLFHDLKKVVKDHAILDDIDLLNQIAEILTI |
| | | YQDKDSIVAELGQLEYLMSEADKQSISELTGYTGTHSLSLKCMNMIIDELW |
| | | HSSMNQMEVFTYLNMRPKKYELKGYQRIPTDMIDDAILSPVVKRTFIQSIN |
| | | VINKVIEKYGIPEDIIIELARENNSDDRKKFINNLQKKNEATRKRINEIIGQTG |
| | | NQNAKRIVEKIRLHDQQEGKCLYSLESIPLEDLLNNPNHYEVDHIIPRSVSFD |
| | | NSYHNKVLVKQSENSKKSNLTPYQYFNSGKSKLSYNQFKQHILNLSKSQD |
| | | RISKKKKEYLLEERDINKFEVQKEFINRNLVDTRYATRELTSYLKAYFSANN |
| | | MDVKVKTINGSFTNHLRKVWRFDKYRNHGYKHHAEDALIIANADFLFKEN |
| | | KKLQNTNKILEKPTIENNTKKVTVEKEEDYNNVFETPKLVEDIKQYRDYKF |
| | | SHRVDKKPNRQLINDTLYSTRMKDEHDYIVQTITDIYGKDNTNLKKQFNK |
| | | NPEKFLMYQNDPKTFEKLSIIMKQYSDEKNPLAKYYEETGEYLTKYSKKN |
| | | NGPIVKKIKLLGNKVGNHLDVTNKYENSTKKLVKLSIKNYRFDVYLTEKG |
| | | YKFVTIAYLNVFKKDNYYYIPKDKYQELKEKKKIKDTDQFIASFYKNDLIK |
| | | LNGDLYKIIGVNSDDRNIIELDYYDIKYKDYCEINNIKGEPRIKKTIGKKTESI |
| | | EKFTTDVLGNLYLHSTEKAPQLIFKRGL |
| 1888 | SRGN3.3 | MNQKFILGLDIGITSVGYGLIDYETKNIIDAGVRLFPEANVENNEGRRSKRG |
| | (N585A) | SRRLKRRRIHRLERVKLLLTEYDLINKEQIPTSNNPYQIRVKGLSEILSKDEL |
| | Nickase | AIALLHLAKRRGIHNVDVAADKEETASDSLSTKDQINKNAKFLESRYVCEL |
| | | QKERLENEGHVRGVENRFLTKDIVREAKKIIDTQMQYYPEIDETFKEKYISL |
| | | VETRREYFEGPGQGSPFGWNGDLKKWYEMLMGHCTYFPQELRSVKYAYS |
| | | ADLFNALNDLNNLIIQRDNSEKLEYHEKYHIIENVFKQKKKPTLKQIAKEIG |
| | | VNPEDIKGYRITKSGTPEFTSFKLFHDLKKVVKDHAILDDIDLLNQIAEILTI |
| | | YQDKDSIVAELGQLEYLMSEADKQSISELTGYTGTHSLSLKCMNMIIDELW |
| | | HSSMNQMEVFTYLNMRPKKYELKGYQRIPTDMIDDAILSPVVKRTFIQSIN |
| | | VINKVIEKYGIPEDIIIELARENNSDDRKKFINNLQKKNEATRKRINEIIGQTG |
| | | NQNAKRIVEKIRLHDQQEGKCLYSLESIPLEDLLNNPNHYEVDHIIPRSVSFD |
| | | NSYHNKVLVKQSEASKKSNLTPYQYFNSGKSKLSYNQFKQHILNLSKSQD |
| | | RISKKKKEYLLEERDINKFEVQKEFINRNLVDTRYATRELTSYLKAYFSANN |
| | | MDVKVKTINGSFTNHLRKVWRFDKYRNHGYKHHAEDALIIANADFLFKEN |
| | | KKLQNTNKILEKPTIENNTKKVTVEKEEDYNNVFETPKLVEDIKQYRDYKF |
| | | SHRVDKKPNRQLINDTLYSTRMKDEHDYIVQTITDIYGKDNTNLKKQFNK |
| | | NPEKFLMYQNDPKTFEKLSIIMKQYSDEKNPLAKYYEETGEYLTKYSKKN |
| | | NGPIVKKIKLLGNKVGNHLDVTNKYENSTKKLVKLSIKNYRFDVYLTEKG |
| | | YKFVTIAYLNVFKKDNYYYIPKDKYQELKEKKKIKDTDQFIASFYKNDLIK |
| | | LNGDLYKIIGVNSDDRNIIELDYYDIKYKDYCEINNIKGEPRIKKTIGKKTESI |
| | | EKFTTDVLGNLYLHSTEKAPQLIFKRGL |
| 1889 | Met (−) | NQKFILGLDIGITSVGYGLIDYETKNIIDAGVRLFPEANVENNEGRRSKRGSR |
| | SRGN3.3(N5 | RLKRRRIHRLERVKLLLTEYDLINKEQIPTSNNPYQIRVKGLSEILSKDELAI |
| | 84A)Nickase | ALLHLAKRRGIHNVDVAADKEETASDSLSTKDQINKNAKFLESRYVCELQ |
| | | KERLENEGHVRGVENRFLTKDIVREAKKIIDTQMQYYPEIDETFKEKYISLV |
| | | ETRREYFEGPGQGSPFGWNGDLKKWYEMLMGHCTYFPQELRSVKYAYSA |
| | | DLFNALNDLNNLIIQRDNSEKLEYHEKYHIIENVFKQKKKPTLKQIAKEIGV |
| | | NPEDIKGYRITKSGTPEFTSFKLFHDLKKVVKDHAILDDIDLLNQIAEILTIY |
| | | QDKDSIVAELGQLEYLMSEADKQSISELTGYTGTHSLSLKCMNMIIDELWH |
| | | SSMNQMEVFTYLNMRPKKYELKGYQRIPTDMIDDAILSPVVKRTFIQSINVI |
| | | NKVIEKYGIPEDIIIELARENNSDDRKKFINNLQKKNEATRKRINEIIGQTGN |
| | | QNAKRIVEKIRLHDQQEGKCLYSLESIPLEDLLNNPNHYEVDHIIPRSVSFDN |
| | | SYHNKVLVKQSEASKKSNLTPYQYFNSGKSKLSYNQFKQHILNLSKSQDRI |
| | | SKKKKEYLLEERDINKFEVQKEFINRNLVDTRYATRELTSYLKAYFSANNM |
| | | DVKVKTINGSFTNHLRKVWRFDKYRNHGYKHHAEDALIIANADFLFKENK |
| | | KLQNTNKILEKPTIENNTKKVTVEKEEDYNNVFETPKLVEDIKQYRDYKFS |
| | | HRVDKKPNRQLINDTLYSTRMKDEHDYIVQTITDIYGKDNTNLKKQFNKN |
| | | PEKFLMYQNDPKTFEKLSIIMKQYSDEKNPLAKYYEETGEYLTKYSKKNN |
| | | GPIVKKIKLLGNKVGNHLDVTNKYENSTKKLVKLSIKNYRFDVYLTEKGY |
| | | KFVTIAYLNVFKKDNYYYIPKDKYQELKEKKKIKDTDQFIASFYKNDLIKL |
| | | NGDLYKIIGVNSDDRNIIELDYYDIKYKDYCEINNIKGEPRIKKTIGKKTESIE |
| | | KFTTDVLGNLYLHSTEKAPQLIFKRGL |
| 1890 | SpG | MDKKYSIGLDIGTNSVGWAVITDEYKVPSKKFKVLGNTDRHSIKKNLIGAL |
| | | LFDSGETAEATRLKRTARRRYTRRKNRICYLQEIFSNEMAKVDDSFFHRLE |
| | | ESFLVEEDKKHERHPIFGNIVDEVAYHEKYPTIYHLRKKLVDSTDKADLRLI |
| | | YLALAHMIKFRGHFLIEGDLNPDNSDVDKLFIQLVQTYNQLFEENPINASGV |
| | | DAKAILSARLSKSRRLENLIAQLPGEKKNGLFGNLIALSLGLTPNFKSNFDL |
| | | AEDAKLQLSKDTYDDDLDNLLAQIGDQYADLFLAAKNLSDAILLSDILRVN |
| | | TEITKAPLSASMIKRYDEHHQDLTLLKALVRQQLPEKYKEIFFDQSKNGYA |
| | | GYIDGGASQEEFYKFIKPILEKMDGTEELLVKLNREDLLRKQRTFDNGSIPH |
| | | QIHLGELHAILRRQEDFYPFLKDNREKIEKILTFRIPYYVGPLARGNSRFAW |
| | | MTRKSEETITPWNFEEVVDKGASAQSFIERMTNFDKNLPNEKVLPKHSLLY |
| | | EYFTVYNELTKVKYVTEGMRKPAFLSGEQKKAIVDLLFKTNRKVTVKQLK |
| | | EDYFKKIECFDSVEISGVEDRFNASLGTYHDLLKIIKDKDFLDNEENEDILED |
| | | IVLTLTLFEDREMIEERLKTYAHLFDDKVMKQLKRRRYTGWGRLSRKLING |
| | | IRDKQSGKTILDFLKSDGFANRNFMQLIHDDSLTFKEDIQKAQVSGQGDSL |
| | | HEHIANLAGSPAIKKGILQTVKVVDELVKVMGRHKPENIVIEMARENQTTQ |
| | | KGQKNSRERMKRIEEGIKELGSQILKEHPVENTQLQNEKLYLYYLQNGRD |
| | | MYVDQELDINRLSDYDVDHIVPQSFLKDDSIDNKVLTRSDKNRGKSDNVPS |
| | | EEVVKKMKNYWRQLLNAKLITQRKFDNLTKAERGGLSELDKAGFIKRQLV |
| | | ETRQITKHVAQILDSRMNTKYDENDKLIREVKVITLKSKLVSDFRKDFQFY |
| | | KVREINNYHHAHDAYLNAVVGTALIKKYPKLESEFVYGDYKVYDVRKMI |
| | | AKSEQEIGKATAKYFFYSNIMNFFKTEITLANGEIRKRPLIETNGETGEIVWD |
| | | KGRDFATVRKVLSMPQVNIVKKTEVQTGGFSKESILPKRNSDKLIARKKD |
| | | WDPKKYGGFLWPTVAYSVLVVAKVEKGKSKKLKSVKELLGITIMERSSFE |
| | | KNPIDFLEAKGYKEVKKDLIIKLPKYSLFELENGRKRMLASAKQLQKGNEL |
| | | ALPSKYVNFLYLASHYEKLKGSPEDNEQKQLFVEQHKHYLDEIIEQISEFSK |
| | | RVILADANLDKVLSAYNKHRDKPIREQAENIIHLFTLTNLGAPAAFKYFDTT |
| | | IDRKQYRSTKEVLDATLIHQSITGLYETRIDLSQLGGD |
| 1891 | SpG (H840A) | MDKKYSIGLDIGTNSVGWAVITDEYKVPSKKFKVLGNTDRHSIKKNLIGAL |
| | Nickase | LFDSGETAEATRLKRTARRRYTRRKNRICYLQEIFSNEMAKVDDSFFHRLE |
| | | ESFLVEEDKKHERHPIFGNIVDEVAYHEKYPTIYHLRKKLVDSTDKADLRLI |
| | | YLALAHMIKFRGHFLIEGDLNPDNSDVDKLFIQLVQTYNQLFEENPINASGV |
| | | DAKAILSARLSKSRRLENLIAQLPGEKKNGLFGNLIALSLGLTPNFKSNFDL |
| | | AEDAKLQLSKDTYDDDLDNLLAQIGDQYADLFLAAKNLSDAILLSDILRVN |
| | | TEITKAPLSASMIKRYDEHHQDLTLLKALVRQQLPEKYKEIFFDQSKNGYA |
| | | GYIDGGASQEEFYKFIKPILEKMDGTEELLVKLNREDLLRKQRTFDNGSIPH |
| | | QIHLGELHAILRRQEDFYPFLKDNREKIEKILTFRIPYYVGPLARGNSRFAW |
| | | MTRKSEETITPWNFEEVVDKGASAQSFIERMTNFDKNLPNEKVLPKHSLLY |
| | | EYFTVYNELTKVKYVTEGMRKPAFLSGEQKKAIVDLLFKTNRKVTVKQLK |
| | | EDYFKKIECFDSVEISGVEDRFNASLGTYHDLLKIIKDKDFLDNEENEDILED |
| | | IVLTLTLFEDREMIEERLKTYAHLFDDKVMKQLKRRRYTGWGRLSRKLING |
| | | IRDKQSGKTILDFLKSDGFANRNFMQLIHDDSLTFKEDIQKAQVSGQGDSL |
| | | HEHIANLAGSPAIKKGILQTVKVVDELVKVMGRHKPENIVIEMARENQTTQ |
| | | KGQKNSRERMKRIEEGIKELGSQILKEHPVENTQLQNEKLYLYYLQNGRD |
| | | MYVDQELDINRLSDYDVDAIVPQSFLKDDSIDNKVLTRSDKNRGKSDNVPS |
| | | EEVVKKMKNYWRQLLNAKLITQRKFDNLTKAERGGLSELDKAGFIKRQLV |
| | | ETRQITKHVAQILDSRMNTKYDENDKLIREVKVITLKSKLVSDFRKDFQFY |
| | | KVREINNYHHAHDAYLNAVVGTALIKKYPKLESEFVYGDYKVYDVRKMI |
| | | AKSEQEIGKATAKYFFYSNIMNFFKTEITLANGEIRKRPLIETNGETGEIVWD |
| | | KGRDFATVRKVLSMPQVNIVKKTEVQTGGFSKESILPKRNSDKLIARKKD |
| | | WDPKKYGGFLWPTVAYSVLVVAKVEKGKSKKLKSVKELLGITIMERSSFE |
| | | KNPIDFLEAKGYKEVKKDLIIKLPKYSLFELENGRKRMLASAKQLQKGNEL |
| | | ALPSKYVNFLYLASHYEKLKGSPEDNEQKQLFVEQHKHYLDEIIEQISEFSK |
| | | RVILADANLDKVLSAYNKHRDKPIREQAENIIHLFTLTNLGAPAAFKYFDTT |
| | | IDRKQYRSTKEVLDATLIHQSITGLYETRIDLSQLGGD |
| 1892 | Met (−) | DKKYSIGLDIGTNSVGWAVITDEYKVPSKKFKVLGNTDRHSIKKNLIGALL |
| | SpG(H839A) | FDSGETAEATRLKRTARRRYTRRKNRICYLQEIFSNEMAKVDDSFFHRLEE |
| | Nickase | SFLVEEDKKHERHPIFGNIVDEVAYHEKYPTIYHLRKKLVDSTDKADLRLIY |
| | | LALAHMIKFRGHFLIEGDLNPDNSDVDKLFIQLVQTYNQLFEENPINASGVD |
| | | AKAILSARLSKSRRLENLIAQLPGEKKNGLFGNLIALSLGLTPNFKSNFDLA |
| | | EDAKLQLSKDTYDDDLDNLLAQIGDQYADLFLAAKNLSDAILLSDILRVNT |
| | | EITKAPLSASMIKRYDEHHQDLTLLKALVRQQLPEKYKEIFFDQSKNGYAG |
| | | YIDGGASQEEFYKFIKPILEKMDGTEELLVKLNREDLLRKQRTFDNGSIPHQ |
| | | IHLGELHAILRRQEDFYPFLKDNREKIEKILTFRIPYYVGPLARGNSRFAWM |
| | | TRKSEETITPWNFEEVVDKGASAQSFIERMTNFDKNLPNEKVLPKHSLLYE |
| | | YFTVYNELTKVKYVTEGMRKPAFLSGEQKKAIVDLLFKTNRKVTVKQLKE |
| | | DYFKKIECFDSVEISGVEDRFNASLGTYHDLLKIIKDKDFLDNEENEDILEDI |
| | | VLTLTLFEDREMIEERLKTYAHLFDDKVMKQLKRRRYTGWGRLSRKLINGI |
| | | RDKQSGKTILDFLKSDGFANRNFMQLIHDDSLTFKEDIQKAQVSGQGDSLH |
| | | EHIANLAGSPAIKKGILQTVKVVDELVKVMGRHKPENIVIEMARENQTTQK |
| | | GQKNSRERMKRIEEGIKELGSQILKEHPVENTQLQNEKLYLYYLQNGRDM |
| | | YVDQELDINRLSDYDVDAIVPQSFLKDDSIDNKVLTRSDKNRGKSDNVPSE |
| | | EVVKKMKNYWRQLLNAKLITQRKFDNLTKAERGGLSELDKAGFIKRQLVE |
| | | TRQITKHVAQILDSRMNTKYDENDKLIREVKVITLKSKLVSDFRKDFQFYK |
| | | VREINNYHHAHDAYLNAVVGTALIKKYPKLESEFVYGDYKVYDVRKMIA |
| | | KSEQEIGKATAKYFFYSNIMNFFKTEITLANGEIRKRPLIETNGETGEIVWDK |
| | | GRDFATVRKVLSMPQVNIVKKTEVQTGGFSKESILPKRNSDKLIARKKDW |
| | | DPKKYGGFLWPTVAYSVLVVAKVEKGKSKKLKSVKELLGITIMERSSFEK |
| | | NPIDFLEAKGYKEVKKDLIIKLPKYSLFELENGRKRMLASAKQLQKGNELA |
| | | LPSKYVNFLYLASHYEKLKGSPEDNEQKQLFVEQHKHYLDEIIEQISEFSKR |
| | | VILADANLDKVLSAYNKHRDKPIREQAENIIHLFTLTNLGAPAAFKYFDTTI |
| | | DRKQYRSTKEVLDATLIHQSITGLYETRIDLSQLGGD |

[0138] In some embodiments, a Cas9 protein comprises a variant Cas9 protein containing one or more amino acid substitutions. In some embodiments, a wildtype Cas9 protein comprises a RuvC domain and an HNH domain. In some embodiments, a prime editor comprises a nuclease active Cas9 protein that may cleave both strands of a double stranded target DNA sequence. In some embodiments, the nuclease active Cas9 protein comprises a functional RuvC domain and a functional HNH domain. In some embodiments, a prime editor comprises a Cas9 nickase that can bind to a guide polynucleotide and recognize a target DNA, but can cleave only one strand of a double stranded target DNA. In some embodiments, the Cas9 nickase comprises only one functional RuvC domain or one functional HNH domain. In some embodiments, a prime editor comprises a Cas9 that has a non-functional HNH domain and a functional RuvC domain. In some embodiments, the prime editor can cleave the edit strand (i.e., the PAM strand), but not the non-edit strand of a double stranded target DNA sequence. In some embodiments, a prime editor comprises a Cas9 having a non-functional RuvC domain that can cleave the target strand (i.e., the non-PAM strand), but not the edit strand of a double stranded target DNA sequence. In some embodiments, a prime editor comprises a Cas9 that has neither a functional RuvC domain nor a functional HNH domain, which may not cleave any strand of a double stranded target DNA sequence.

[0139] In some embodiments, a prime editor comprises a Cas9 having a mutation in the RuvC domain that reduces or abolishes the nuclease activity of the RuvC domain. In some embodiments, the Cas9 comprises a mutation at amino acid D10 as compared to a wild type SpCas9 as set forth in SEQ ID NO: 1865, or a corresponding mutation thereof. In some embodiments, the Cas9 comprises a D10A mutation as compared to a wild type SpCas9 as set forth in SEQ ID NO: 1865, or a corresponding mutation thereof. In some embodiments, the Cas9 polypeptide comprises a mutation at amino acid D10, G12, and/or G17 as compared to a wild type SpCas9 as set forth in SEQ ID NO: 1865, or a corresponding mutation thereof. In some embodiments, the Cas9 polypeptide comprises a D10A mutation, a G12A mutation, and/or a G17A mutation as compared to a wild type SpCas9 as set forth in SEQ ID NO: 1865, or a corresponding mutation thereof.

[0140] In some embodiments, a prime editor comprises a Cas9 polypeptide having a mutation in the HNH domain that reduces or abolishes the nuclease activity of the HNH domain. In some embodiments, the Cas9 polypeptide comprises a mutation at amino acid H840 as compared to a wild type SpCas9 as set forth in SEQ ID NO: 1865, or a corresponding mutation thereof. In some embodiments, the Cas9 polypeptide comprises a H840A mutation as compared to a wild type SpCas9 as set forth in SEQ ID NO: 1865, or a corresponding mutation thereof. In some embodiments, the Cas9 polypeptide comprises a mutation at amino acid E762, D839, H840, N854, N856, N863, H982, H983, A984, D986, and/or a A987 as compared to a wild type SpCas9 as set forth in SEQ ID NO: 1865, or a corresponding mutation thereof. In some embodiments, the Cas9 polypeptide comprises a E762A, D839A, H840A, N854A, N856A, N863A, H982A, H983A, A984A, and/or a D986A mutation as compared to a wild type SpCas9 as set forth in SEQ ID NO: 1865, or a corresponding mutation thereof. In some embodiments, the Cas9 polypeptide comprises a mutation at amino acid residue R221, N394, and/or H840 as compared to a wild type SpCas9 (e.g., SEQ ID NO: 1865). In some embodiments, the Cas9 polypeptide comprises a R221K, N394L, and/or H840A mutation as compared to a wild type SpCas9 as set forth in SEQ ID NO: 1865, or a corresponding mutation thereof. In some embodiments, the Cas9 polypeptide comprises a mutation at amino acid residue R220, N393, and/or H839 as compared to a wild type SpCas9 (e.g., SEQ ID NO: 1865) lacking a N-terminal methionine, or a corresponding mutation thereof. In some embodiments, the Cas9 polypeptide comprises a R220K, N393K, and/or H839A mutation as compared to a wild type SpCas9 (as set forth in SEQ ID NO: 1865) lacking a N-terminal methionine, or a corresponding mutation thereof.

[0141] In some embodiments, a prime editor comprises a Cas9 having one or more amino acid substitutions in both the HNH domain and the RuvC domain that reduce or abolish the nuclease activity of both the HNH domain and the RuvC domain. In some embodiments, the prime editor comprises a nuclease inactive Cas9, or a nuclease dead Cas9 (dCas9). In some embodiments, the dCas9 comprises a H840X substitution and a D10X mutation compared to a wild type SpCas9 as set forth in SEQ ID NO: 1865 or corresponding mutations thereof, wherein X is any amino acid other than H for the H840X substitution and any amino acid other than D for the D10X substitution. In some embodiments, the dead Cas9 comprises a H840A and a D10A mutation as compared to a wild type SpCas9 as set forth in SEQ ID NO: 1865, or corresponding mutations thereof.

[0142] In some embodiments, the N-terminal methionine is removed from the amino acid sequence of a Cas9 nickase, or from any Cas9 variant, ortholog, or equivalent disclosed or contemplated herein. For example, methionine-minus (Met (−)) Cas9 nickases include any one of the sequences set forth in SEQ ID NOs: 1867, 1868, 1871, 1874, 1877, 1880, 1883, 1886, 1889, 1892, or a variant thereof having an amino acid sequence that has at least 80%, at least 85%, at least 90%, at least 95%, or at least 99% sequence identity thereto.

[0143] Besides dead Cas9 and Cas9 nickase variants, the Cas9 proteins used herein may also include other Cas9 variants having at least about 70%, at least about 80%, at least about 90%, at least about 95%, at least about 96%, at least about 97%, at least about 98%, at least about 99%, at least about 99.5%, or at least about 99.9% sequence identity to any reference Cas9 protein, including any wild type Cas9, or mutant Cas9 (e.g., a dead Cas9 or Cas9 nickase), or fragment Cas9, or circular permutant Cas9, or other variant of Cas9 disclosed herein or known in the art. In some embodiments, a Cas9 variant may have 1, 2, 3, 4, 5, 6, 7, 8, 9, 10, 11, 12, 13, 14, 15, 16, 17, 18, 19, 20, 21, 22, 21, 24, 25, 26, 27, 28, 29, 30, 31, 32, 33, 34, 35, 36, 37, 38, 39, 40, 41, 42, 43, 44, 45, 46, 47, 48, 49, 50 or more amino acid changes compared to a reference Cas9, e.g., a wild type Cas9. In some embodiments, the Cas9 variant comprises a fragment of a reference Cas9 (e.g., a gRNA binding domain or a DNA-cleavage domain), such that the fragment is at least about 70% identical, at least about 80% identical, at least about 90% identical, at least about 95% identical, at least about 96% identical, at least about 97% identical, at least about 98% identical, at least about 99% identical, at least about 99.5% identical, or at least about 99.9% identical to the corresponding fragment of a reference Cas9, e.g., a wild type Cas9. In some embodiments, the fragment is at least 30%, at least 35%, at least 40%, at least 45%, at least 50%, at least 55%, at least 60%, at least 65%, at least 70%, at least 75%, at least 80%, at least 85%, at least 90%, at least 95% identical, at least 96%, at least 97%, at least 98%, at least 99%, or at least 99.5% of the amino acid length of a corresponding wild type Cas9.

[0144] In some embodiments, a Cas9 fragment is a functional fragment that retains one or more Cas9 activities. In some embodiments, the Cas9 fragment is at least 100 amino acids in length. In some embodiments, the fragment is at least 100, 150, 200, 250, 300, 350, 400, 450, 500, 550, 600, 650, 700, 750, 800, 850, 900, 950, 1000, 1050, 1100, 1150, 1200, 1250, or at least 1300 amino acids in length.

[0145] In some embodiments, a prime editor comprises a Cas protein, e.g., Cas9, containing modifications that allow altered PAM recognition. In prime editing using a Cas-protein-based prime editor, a “protospacer adjacent motif (PAM)”, PAM sequence, or PAM-like motif, may be used to refer to a short DNA sequence immediately following the protospacer sequence on the PAM strand of the target gene. In some embodiments, the PAM is recognized by the Cas nuclease in the prime editor during prime editing. In certain embodiments, the PAM is required for target binding of the Cas protein. The specific PAM sequence required for Cas protein recognition may depend on the specific type of the Cas protein. A PAM can be 1, 2, 3, 4, 5, 6, 7, 8, 9, 10 or more nucleotides in length. In some embodiments, a PAM is between 2-6 nucleotides in length. In some embodiments, the PAM can be a 5′ PAM (i.e., located upstream of the 5′ end of the protospacer). In other embodiments, the PAM can be a 3′ PAM (i.e., located downstream of the 5′ end of the protospacer). In some embodiments, the Cas protein of a prime editor recognizes a canonical PAM, for example, a SpCas9 recognizes 5′-NGG-3′ PAM. In some embodiments, the Cas protein of a prime editor has altered or non-canonical PAM specificities. Exemplary PAM sequences and corresponding Cas variants are described in Table 9 below. It should be appreciated that for each of the variants provided, the Cas protein comprises one or more of the amino acid substitutions as indicated compared to a wild type Cas protein sequence, for example, the Cas9 as set forth in SEQ ID NO: 1865. The PAM motifs as shown in Table 9 below are in the order of 5′ to 3′. In some embodiments, the Cas proteins of the disclosure can also be used to direct transcriptional control of target sequences, for example silencing transcription by sequence-specific binding to target sequences. In some embodiments, a Cas protein described herein may have one or mutations in a PAM recognition motif. In some embodiments, a Cas protein described herein may have altered PAM specificity.

[0146] As used in PAM sequences in Table 9, “N” refers to any one of nucleotides A, G, C, and T, “R” refers to nucleotide A or G, and “Y” refers to nucleotide C or T.

TABLE 9
Cas protein variants and corresponding PAM sequences

| Variant | PAM |
|---|---|
| spCas9 (wild type) | NGG, NGA, NAG, NGNGA |
| spCas9- VRVRFRR R1335V, L1111R, D1135V, G1218R, | NG |
| E1219F, A1322R, T1337R | |
| spCas9-VQR (D1135V, R1335Q, T1337R) | NGA |
| spCas9-EQR (D1135E, R1335Q, T1337R) | NGA |
| spCas9-VRER (D1135V, G1218R, R1335E, T1337R) | NGCG |
| spCas9-VRQR (D1135V, G1218R, R1335Q, T1337R) | NGA |
| Cas9-NG (L1111R, D1135V, G1218R, E1219F, A1322R, | NGN |
| T1337R, R1335V) | |
| SpG Cas9 (D1135L, S1136W, G1218K, E1219Q, R1335Q, | NGN |
| T1337R) | |
| SyRY Cas9 | NRN |
| (A61R, L1111R, N1317R, A1322R, and R1333P) | |
| xCas9 (E480K, E543D, E1219V, K294R, Q1256K, A262T, | NGN |
| S409I, M694I) | |
| SluCa9 | NNGG |
| sRGN1, sRGN2, sRGN4, sRGN3.1, sRGN3.3 | NNGG |
| saCas9 | NNGRRT, NNGRRN |
| saCas9-KKH (E782K, N968K, R1015H) | NNNRRT |
| spCas9-MQKSER (D1135M, S1136Q, G1218K, E1219S, | NGCG/NGCN |
| R1335E, T1337R) | |
| spCas9-LRKIQK (D1135L, S1136R, G1218K, E1219I, | NGTN |
| R1335Q, T1337K) | |
| spCas9-LRVSQK (D1135L, S1136R, G1218V, E1219S, | NGTN |
| R1335Q, T1337K) | |
| spCas9-LRVSQL (D1135L, S1136R, G1218V, E1219S, | NGTN |
| R1335Q, T1337L) | |
| Cpf1 | TTTV |
| Spy-Mac | NAA |
| NmCas9 | NNNNGATT |
| StCas9 | NNAGAAW |
| TdCas9 | NAAAAC |

[0147] In some embodiments, a prime editor comprises a Cas9 polypeptide comprising one or mutations selected from the group consisting of: A61R, L111R, D1135V, R221K, A262T, R324L, N394K, S409I, S409I, E427G, E480K, M495V, N497A, Y515N, K526E, F539S, E543D, R654L, R661A, R661L, R691A, N692A, M694A, M694I, Q695A, H698A, R753G, M763I, K848A, K890N, Q926A, K1003A, R1060A, L1111R, R1114G, D1135E, D1135L, D1135N, S1136W, V1139A, D1180G, G1218K, G1218R, G1218S, E1219Q, E1219V, E1219V, Q1221H, P1249S, E1253K, N1317R, A1320V, P1321S, A1322R, I1322V, D1332G, R1332N, A1332R, R1333K, R1333P, R1335L, R1335Q, R1335V, T1337N, T1337R, S1338T, H1349R, and any combinations thereof as compared to a wildtype SpCas9 polypeptide as set forth in SEQ ID NO: 1865.

[0148] In some embodiments, a prime editor comprises a SaCas9 polypeptide. In some embodiments, the SaCas9 polypeptide comprises one or more of mutations E782K, N968K, and R1015H as compared to a wild type SaCas9. In some embodiments, a prime editor comprises a FnCas9 polypeptide, for example, a wildtype FnCas9 polypeptide or a FnCas9 polypeptide comprising one or more of mutations E1369R, E1449H, or R1556A as compared to the wild type FnCas9. In some embodiments, a prime editor comprises a Sc Cas9, for example, a wild type ScCas9 or a ScCas9 polypeptide comprises one or more of mutations I367K, G368D, I369K, H371L, T375S, T376G, and T1227K as compared to the wild type ScCas9. In some embodiments, a prime editor comprises a St1 Cas9 polypeptide, a St3 Cas9 polypeptide, or a SluCas9 polypeptide.

[0149] In some embodiments, a prime editor comprises a Cas polypeptide that comprises a circular permutant Cas variant. For example, a Cas9 polypeptide of a prime editor may be engineered such that the N-terminus and the C-terminus of a Cas9 protein (e.g., a wild type Cas9 protein, or a Cas9 nickase) are topically rearranged to retain the ability to bind DNA when complexed with a guide RNA (gRNA). An exemplary circular permutant configuration may be N-terminus-[original C-terminus]-[original N-terminus]-C-terminus. Any of the Cas9 proteins described herein, including any variant, ortholog, or naturally occurring Cas9 or equivalent thereof, may be reconfigured as a circular permutant variant.

[0150] In various embodiments, the circular permutants of a Cas protein, e.g., a Cas9, may have the following structure: N-terminus-[original C-terminus]-[optional linker]-[original N-terminus]-C-terminus. In some embodiments, a circular permutant Cas9 comprises any one of the following structures (amino acid positions as set forth in SEQ ID NO: 1865):
[0151] N-terminus-[1268-1368]-[optional linker]-[1-1267]-C-terminus;
[0152] N-terminus-[1168-1368]-[optional linker]-[1-1167]-C-terminus;
[0153] N-terminus-[1068-1368]-[optional linker]-[1-1067]-C-terminus;
[0154] N-terminus-[968-1368]-[optional linker]-[1-967]-C-terminus;
[0155] N-terminus-[868-1368]-[optional linker]-[1-867]-C-terminus;
[0156] N-terminus-[768-1368]-[optional linker]-[1-767]-C-terminus;
[0157] N-terminus-[668-1368]-[optional linker]-[1-667]-C-terminus;
[0158] N-terminus-[568-1368]-[optional linker]-[1-567]-C-terminus;
[0159] N-terminus-[468-1368]-[optional linker]-[1-467]-C-terminus;
[0160] N-terminus-[368-1368]-[optional linker]-[1-367]-C-terminus;
[0161] N-terminus-[268-1368]-[optional linker]-[1-267]-C-terminus;
[0162] N-terminus-[168-1368]-[optional linker]-[1-167]-C-terminus;
[0163] N-terminus-[68-1368]-[optional linker]-[1-67]-C-terminus;
[0164] N-terminus-[10-1368]-[optional linker]-[1-9]-C-terminus, or the corresponding circular permutants of other Cas9 proteins (including other Cas9 orthologs, variants, etc).

[0165] In some embodiments, a circular permutant Cas9 comprises any one of the following structures (amino acid positions as set forth in SEQ ID NO: 1865-1368 amino acids of UniProtKB—Q99ZW2:
[0166] N-terminus-[102-1368]-[optional linker]-[1-101]-C-terminus;
[0167] N-terminus-[1028-1368]-[optional linker]-[1-1027]-C-terminus;
[0168] N-terminus-[1041-1368]-[optional linker]-[1-1043]-C-terminus;
[0169] N-terminus-[1249-1368]-[optional linker]-[1-1248]-C-terminus; or
[0170] N-terminus-[1300-1368]-[optional linker]-[1-1299]-C-terminus, or the corresponding circular permutants of other Cas9 proteins (including other Cas9 orthologs, variants, etc).

[0171] In some embodiments, a circular permutant Cas9 comprises any one of the following structures (amino acid positions as set forth in SEQ ID NO: 1865-1368 amino acids of UniProtKB-Q99ZW2 N-terminus-[103-1368]-[optional linker]-[1-102]-C-terminus:
[0172] N-terminus-[1029-1368]-[optional linker]-[1-1028]-C-terminus;
[0173] N-terminus-[1042-1368]-[optional linker]-[1-1041]-C-terminus;
[0174] N-terminus-[1250-1368]-[optional linker]-[1-1249]-C-terminus; or
[0175] N-terminus-[1301-1368]-[optional linker]-[1-1300]-C-terminus, or the corresponding circular permutants of other Cas9 proteins (including other Cas9 orthologs, variants, etc).

[0176] In some embodiments, the circular permutant can be formed by linking a C-terminal fragment of a Cas9 to an N-terminal fragment of a Cas9, either directly or by using a linker, such as an amino acid linker. In some embodiments, the C-terminal fragment may correspond to the 95% or more of the C-terminal amino acids of a Cas9 (e.g., amino acids about 1300-1368 as set forth in SEQ ID No: 1865 or corresponding amino acid positions thereof), or the 90%, 85%, 80%, 75%, 70%, 65%, 60%, 55%, 50%, 45%, 40%, 35%, 30%, 25%, 20%, 15%, 10%, or 5% or more of the C-terminal amino acids of a Cas9 (e.g., SEQ ID NO 1865 or a ortholog or a variant thereof). The N-terminal portion may correspond to 95% or more of the N-terminal amino acids of a Cas9 (e.g., amino acids about 1-1300 as set forth in SEQ ID NO: 1865 or corresponding amino acid positions thereof), or 90%, 85%, 80%, 75%, 70%, 65%, 60%, 55%, 50%, 45%, 40%, 35%, 30%, 25%, 20%, 15%, 10%, or 5% or more of the N terminal amino acids of a Cas9 (e.g., as set forth in SEQ ID NO: 1865 or corresponding amino acid positions thereof).

[0177] In some embodiments, the circular permutant can be formed by linking a C-terminal fragment of a Cas9 to an N-terminal fragment of a Cas9, either directly or by using a linker, such as an amino acid linker. In some embodiments, the C-terminal fragment that is rearranged to the N-terminus includes or corresponds to the C-terminal 30% or less of the amino acids of a Cas9 (e.g., amino acids 1012-1368 as set forth in SEQ ID NO: 1865 or corresponding amino acid positions thereof). In some embodiments, the C-terminal fragment that is rearranged to the N-terminus, includes or corresponds to the C-terminal 30%, 29%, 28%, 27%, 26%, 25%, 24%, 23%, 22%, 21%, 20%, 19%, 18%, 17%, 16%1, 15%1, 4%, 13%, 12%, 1%, 10%, 9%, 8%, 7%, 6%, 5%, 4%, 3%, 2%, or 1% of the amino acids of a Cas9 (e.g., as set forth in SEQ ID NO: 1865 or corresponding amino acid positions thereof). In some embodiments, the C-terminal fragment that is rearranged to the N-terminus, includes or corresponds to the C-terminal 410 residues or less of a Cas9 (e.g., as set forth in SEQ ID No: 1865 or corresponding amino acid positions thereof). In some embodiments, the C-terminal portion that is rearranged to the N-terminus, includes or corresponds to the C-terminal 410, 400, 390, 380, 370, 360, 350, 340, 330, 320, 310,300, 290, 280, 270, 260, 250, 240, 230, 220, 210, 200, 190, 180, 170, 160, 150, 140, 130, 120, 110, 100, 90, 80, 70, 60, 50, 40, 30, 20, or 10 residues of a Cas9 (e.g., as set forth in SEQ ID NO: 1865 or corresponding amino acid positions thereof). In some embodiments, the C-terminal portion that is rearranged to the N-terminus includes or corresponds to the C-terminal 357, 341, 328, 120, or 69 residues of a Cas9 (e.g., as set forth in SEQ ID NO: 1865 or corresponding amino acid positions thereof).

[0178] In other embodiments, circular permutant Cas9 variants may be a topological rearrangement of a Cas9 primary structure based on the following method, which is based on S. pyogenes Cas9 of SEQ ID NO: 1865: (a) selecting a circular permutant (CP) site corresponding to an internal amino acid residue of the Cas9 primary structure, which dissects the original protein into two halves: an N-terminal region and a C-terminal region; (b) modifying the Cas9 protein sequence (e.g., by genetic engineering techniques) by moving the original C-terminal region (comprising the CP site amino acid) to precede the original N-terminal region, thereby forming a new N-terminus of the Cas9 protein that now begins with the CP site amino acid residue. The CP site can be located in any domain of the Cas9 protein, including, for example, the helical-II domain, the RuvCIII domain, or the CTD domain. For example, the CP site may be located (as set forth in SEQ ID NO: 1865 or corresponding amino acid positions thereof) at original amino acid residue 181, 199, 230, 270, 310, 1010, 1016, 1023, 1029, 1041, 1247, 1249, or 1282. Thus, once relocated to the N-terminus, original amino acid 181, 199, 230, 270, 310, 1010, 1016, 1023, 1029, 1041, 1247, 1249, or 1282 would become the new N-terminal amino acid. Nomenclature of these CP-Cas9 proteins may be referred to as Cas9-CP¹⁸¹, Cas9-CP¹⁹⁹, Cas9-CP²³⁰, Cas9-CP²⁷⁰, Cas9-CP³¹⁰, Cas9-CP¹⁰¹⁰, Cas9-CP¹⁰¹⁶, Cas9-CP¹⁰²³, Cas9-CP¹⁰²⁹, Cas9-CP¹⁰⁴¹, Cas9-CP¹²⁴⁷, Cas9-CP¹²⁴⁹, and Cas9-CP¹²⁸², respectively. This description is not meant to be limited to making CP variants from SEQ ID NO: 1865, but may be implemented to make CP variants in any Cas9 sequence, either at CP sites that correspond to these positions, or at other CP sites entirely. This description is not meant to limit the specific CP sites in any way. Virtually any CP site may be used to form a CP-Cas9 variant.

[0179] In some embodiments, a prime editor comprises a Cas9 functional variant that is of smaller molecular weight than a wild type SpCas9 protein. In some embodiments, a smaller-sized Cas9 functional variant may facilitate delivery to cells, e.g., by an expression vector, nanoparticle, or other means of delivery. In certain embodiments, a smaller-sized Cas9 functional variant is a Class 2 Type II Cas protein. In certain embodiments, a smaller-sized Cas9 functional variant is a Class 2 Type V Cas protein. In certain embodiments, a smaller-sized Cas9 functional variant is a Class 2 Type VI Cas protein.

[0180] In some embodiments, a prime editor comprises a SpCas9 that is 1368 amino acids in length and has a predicted molecular weight of 158 kilodaltons. In some embodiments, a prime editor comprises a Cas9 functional variant or functional fragment that is less than 1300 amino acids, less than 1290 amino acids, than less than 1280 amino acids, less than 1270 amino acids, less than 1260 amino acid, less than 1250 amino acids, less than 1240 amino acids, less than 1230 amino acids, less than 1220 amino acids, less than 1210 amino acids, less than 1200 amino acids, less than 1190 amino acids, less than 1180 amino acids, less than 1170 amino acids, less than 1160 amino acids, less than 1150 amino acids, less than 1140 amino acids, less than 1130 amino acids, less than 1120 amino acids, less than 1110 amino acids, less than 1100 amino acids, less than 1050 amino acids, less than 1000 amino acids, less than 950 amino acids, less than 900 amino acids, less than 850 amino acids, less than 800 amino acids, less than 750 amino acids, less than 700 amino acids, less than 650 amino acids, less than 600 amino acids, less than 550 amino acids, or less than 500 amino acids, but at least larger than about 400 amino acids and retaining the one or more functions, e.g., DNA binding function, of the Cas9 protein.

[0181] In some embodiments, the Cas protein may include any CRISPR associated protein, including but not limited to, Cas12a, Cas12b1, Cas1, Cas1B, Cas2, Cas3, Cas4, Cas5, Cas6, Cas7, Cas8, Cas9 (also known as Csn1 and Csx12), Cas10, Csy1, Csy2, Csy3, Cse1, Cse2, Csc1, Csc2, Csa5, Csn2, Csm2, Csm3, Csm4, Csm5, Csm6, Cmr1, Cmr3, Cmr4, Cmr5, Cmr6, Csb1, Csb2, Csb3, Csx17, Csx14, Csx10, Csx16, CsaX, Csx3, Csx1, Csx15, Csf1, Csf2, Csf3, Csf4, homologs thereof, or modified versions thereof, and preferably comprising a nickase mutation (e.g., a mutation corresponding to the D10A mutation of the wild type Cas9 polypeptide of SEQ ID NO: 1865). In various other embodiments, the napDNAbp can be any of the following proteins: a Cas9, a Cas112a (Cpf1), a Cas12e (CasX), a Cas12d (CasY), a Cas12b1 (C2c1), a Cas13a (C2c2), a Cas2c (C23), a GeoCas9, a CjCas9, a Cas2g, a Cas12h, a Cas12i. a Cas13b, a Cas3c, a Cas13d, a Cas14, a Csn2, an xCas9, an SpCas9-NG, a circularly permuted Cas9, or an Argonaute (Ago) domain, or a functional variant or fragment thereof.

[0182] Exemplary Cas proteins and nomenclature are shown in Table 10 below:

TABLE 10
Exemplary Cas proteins and nomenclature

| | |
|---|---|
| Legacy nomenclature | Current nomenclature |

type II CRISPR-Cas enzymes

| | |
|---|---|
| Cas9 | same |

type V CRISPR-Cas enzymes

| | |
|---|---|
| Cpf1 | Cas12a |
| CasX | Cas12e |
| C2c1 | Cas12b1 |
| Cas12b2 | same |
| C2c3 | Cas12c |
| CasY | Cas12d |
| C2c4 | same |
| C2c8 | same |
| C2c5 | same |
| C2c10 | same |
| C2c9 | same |

type VI CRISPR-Cas enzymes

| | |
|---|---|
| C2c2 | Cas13a |
| Cas13d | same |
| C2c7 | Cas13c |
| C2c6 | Cas13b |

[0183] In some embodiments, prime editors described herein may also comprise Cas proteins other than Cas9. For example, in some embodiments, a prime editor as described herein may comprise a Cas12a (Cpf1) polypeptide or functional variants thereof. In some embodiments, the Cas12a polypeptide comprises a mutation that reduces or abolishes the endonuclease domain of the Cas112a polypeptide. In some embodiments, the Cas12a polypeptide is a Cas12a nickase. In some embodiments, the Cas protein comprises an amino acid sequence that comprises at least about 5000, 60%, 70%, 80%, 90%, 91%, 92%, 93%, 94%, 95%, 96%, 97%, 98%, 99%, or 10000 sequence identity to a naturally occurring Cas12a polypeptide.

[0184] In some embodiments, a prime editor comprises a Cas protein that is a Cas12b (C2c1) or a Cas12c (C2c3) polypeptide. In some embodiments, the Cas protein comprises an amino acid sequence that comprises at least about 50%, 60%, 70%, 80%, 90%, 91%, 92%, 93%, 94%, 95%, 96%, 97%, 98%, 99%, or 100% sequence identity to a naturally occurring Cas12b (C2c1l) or Cas12c (C2c3) protein. In some embodiments, the Cas protein is a Cas12b nickase or a Cas12c nickase. In some embodiments, the Cas protein is a Cas12e, a Cas12d, a Cas13, Cas14a, Cas14b, Cas14c, Cas14d, Cas14e, Cas14f, Cas14g, Cas14h, Cas14u, or a CasΦ polypeptide. In some embodiments, the Cas protein comprises an amino acid sequence that comprises at least about 50%, 60%, 70%, 80%, 90%, 91%, 92%, 93%, 94%, 95%, 96%, 97%, 98%, 99%, or 100% sequence identity to a naturally-occurring Cas12e, Cas12d, Cas13, Cas14a, Cas14b, Cas14c, Cas14d, Cas14e, Cas14f, Cas14g, Cas14h, Cas14u, or Cas Φ protein. In some embodiments, the Cas protein is a Cas12e, Cas12d, Cas13, or Cas Φ nickase.

### Nuclear Localization Sequences

[0185] In some embodiments, a prime editor further comprises one or more nuclear localization sequence (NLS). In some embodiments, the NLS helps promote translocation of a protein into the cell nucleus. In some embodiments, a prime editor comprises a fusion protein, e.g., a fusion protein comprising a DNA binding domain and a DNA polymerase, that comprises one or more NLSs. In some embodiments, one or more polypeptides of the prime editor are fused to or linked to one or more NLSs. In some embodiments, the prime editor comprises a DNA binding domain and a DNA polymerase domain that are provided in trans, wherein the DNA binding domain and/or the DNA polymerase domain is fused or linked to one or more NLSs.

[0186] In certain embodiments, a prime editor or prime editing complex comprises at least one NLS. In some embodiments, a prime editor or prime editing complex comprises at least two NLSs. In embodiments with at least two NLSs, the NLSs can be the same NLS, or they can be different NLSs.

[0187] In some instances, a prime editor may further comprise at least one nuclear localization sequence (NLS). In some cases, a prime editor may further comprise 1 NLS. In some cases, a prime editor may further comprise 2 NLSs. In other cases, a prime editor may further comprise 3 NLSs. In one case, a primer editor can further comprise more than 4, 5, 6, 7, 8, 9 or 10 NLSs.

[0188] In addition, the NLSs can be expressed as part of a prime editor complex. In some embodiments, a NLS can be positioned almost anywhere in a protein's amino acid sequence, and generally comprises a short sequence of three or more or four or more amino acids. The location of the NLS fusion can be at the N-terminus, the C-terminus, or positioned anywhere within a sequence of a prime editor or a component thereof (e.g., inserted between the DNA-binding domain and the DNA polymerase domain of a prime editor fusion protein, between the DNA binding domain and a linker sequence, between a DNA polymerase and a linker sequence, between two linker sequences of a prime editor fusion protein or a component thereof, in either N-terminus to C-terminus or C-terminus to N-terminus order). In some embodiments, a prime editor is fusion protein that comprises an NLS at the N terminus. In some embodiments, a prime editor is fusion protein that comprises an NLS at the C terminus. In some embodiments, a prime editor is fusion protein that comprises at least one NLS at both the N terminus and the C terminus. In some embodiments, the prime editor is a fusion protein that comprises two NLSs at the N terminus and/or the C terminus.

[0189] Any NLSs that are known in the art are also contemplated herein. The NLSs may be any naturally occurring NLS, or any non-naturally occurring NLS (e.g., an NLS with one or more mutations relative to a wild-type NLS). In some embodiments, the one or more NLSs of a prime editor comprise bipartite NLSs. In some embodiments, a nuclear localization signal (NLS) is predominantly basic. In some embodiments, the one or more NLSs of a prime editor are rich in lysine and arginine residues. In some embodiments, the one or more NLSs of a prime editor comprise proline residues. In some embodiments, a nuclear localization signal (NLS) comprises the sequence MDSLLMNRRKFLYQFKNVRWAKGRRETYLC (SEQ ID NO: 1893), KRTADGSEFESPKKKRKV (SEQ ID NO: 1894), KRTADGSEFEPKKKRKV (SEQ ID NO: 1895), NLSKRPAAIKKAGQAKKKK (SEQ ID NO: 1896), RQRRNELKRSF (SEQ ID NO: 1897), or NQSSNFGPMKGGNFGGRSSGPYGGGGQYFAKPRNQGGY(SEQ ID NO: 1898).

[0190] In some embodiments, a NLS is a monopartite NLS. For example, in some embodiments, a NLS is a SV40 large T antigen NLS PKKKRKV (SEQ ID NO: 1899). In some embodiments, a NLS is a bipartite NLS. In some embodiments, a bipartite NLS comprises two basic domains separated by a spacer sequence comprising a variable number of amino acids. In some embodiments, a NLS is a bipartite NLS. In some embodiments, a bipartite NLS consists of two basic domains separated by a spacer sequence comprising a variable number of amino acids. In some embodiments, the spacer amino acid sequence comprises the sequence KRXXXXXXXXXXKKKL (Xenopus nucleoplasmin NLS) (SEQ ID NO: 1900), wherein X is any amino acid. In some embodiments, the NLS comprises a nucleoplasmin NLS sequence KRPAATKKAGQAKKKK (SEQ ID NO: 1901). In some embodiments, a NLS is a noncanonical sequences such as M9 of the hnRNP Al protein, the influenza virus nucleoprotein NLS, and the yeast Gal4 protein NLS. In some embodiments, a NLS is a noncanonical sequences such as M9 of the hnRNP Al protein, the influenza virus nucleoprotein NLS, and the yeast Gal4 protein NLS.

[0191] Other non-limiting examples of NLS sequences are provided in Table 11 below. In some embodiments, a bipartite NLS consists of two basic domains separated by a spacer sequence comprising a variable number of amino acids. In some embodiments, a NLS comprises an amino acid sequence that is at least about 50%, 60%, 70%, 80%, 90%, 91%, 92%, 93%, 94%, 95%, 96%, 97%, 98%, 99%, or 100% identical to the amino acid sequence of any one of SEQ ID NOs: 1893-1911. In some embodiments, a NLS comprises an amino acid sequence selected from the group consisting of SEQ ID NOs: 1893-1911. In some embodiments, a prime editing composition comprises a polynucleotide that encodes a NLS that comprises an amino acid sequence that is at least about 50%, 60%, 70%, 80%, 90%, 91%, 92%, 93%, 94%, 95%, 96%, 97%, 98%, 99%, or 100% identical to the amino acid sequence of any one of SEQ ID NOs: 1893-1911. In some embodiments, a prime editing composition comprises a polynucleotide that encodes a NLS that comprises an amino acid sequence selected from the group consisting of 1893-1911.

[0192] Any NLSs that are known in the art are also contemplated herein. The NLSs may be any naturally occurring NLS, or any non-naturally occurring NLS (e.g., an NLS with one or more mutations relative to a wild-type NLS). In some embodiments, the one or more NLSs of a prime editor comprise bipartite NLSs. In some embodiments, the one or more NLSs of a prime editor are rich in lysine and arginine residues. In some embodiments, the one or more NLSs of a prime editor comprise proline residues. Non-limiting examples of NLS sequences are provided in Table 11 below.

TABLE 11
Exemplary nuclear localization sequences

| | | SEQ ID |
|---|---|---|
| Description | Sequence | NO: |
| NLS of SV40 Large T-AG | PKKKRKV | 1899 |
| NLS | MKRTADGSEFESPKKKRKV | 1902 |
| NLS | MDSLLMNRRKFLYQFKNVRWAKGRRETYLC | 1893 |
| NLS of Nucleoplasmin | AVKRPAATKKAGQAKKKKLD | 1903 |
| NLS of EGL-13 | MSRRRKANPTKLSENAKKLAKEVEN | 1904 |
| NLS of C-Myc | PAAKRVKLD | 1905 |
| NLS of Tus-protein | KLKIKRPVK | 1906 |
| NLS of polyoma large T-AG | VSRKRPRP | 1907 |
| NLS of Hepatitis D virus | EGAPPAKRAR | 1908 |
| antigen | | |
| NLS of Rev protein | RQARRNRRRRWRERNR | 1909 |
| NLS of murine p53 | PPQPKKKPLDGE | 1910 |
| C terminal linker and NLS of | SGGSKRTADGSEFEPKKKRKV | 1911 |
| an exemplary prime editor | | |
| fusion protein | | |
| NLS | KRTADGSEFEPKKKRKV | 1895 |

[0193] In some embodiments, a prime editing complex comprises a fusion protein comprising a DNA binding domain (e.g., Cas9(H840A)) and a reverse transcriptase (e.g., a variant MMLV RT) having the following structure: [NLS]-[Cas9(H840A)]-[linker]-[MMLV_RT(D200N)(T330P)(L603W)(T306K)(W313F)], and a desired PEgRNA. In some embodiments, the prime editing complex comprises a prime editor fusion protein that has the amino acid sequence of SEQ ID NO: 1931. Sequence of an exemplary prime editor fusion protein comprising a DNA binding domain (e.g., Cas9(H840A)) and a reverse transcriptase (e.g., a variant MMLV RT) having the following structure: [NLS]-[Cas9(H840A)]-[linker]-[MMLV_RT(D200N)(T330P)(L603W)(T306K)(W313F)] and its components are shown in Table 12.

[0194] In some embodiments, a prime editing complex comprises a fusion protein comprising a DNA binding domain (e.g., Cas9((R221K N394K H840A)) and a reverse transcriptase (e.g., a variant MMLV RT) having the following structure: [NLS]-[Cas9((R221K N394K H840A)]-[linker]-[MMLV_RT(D200N)(T330P)(L603W)(T306K)(W313F)], and a desired PEgRNA. In some embodiments, the prime editing complex comprises a prime editor fusion protein that has the amino acid sequence of SEQ ID NO: 1932. Sequence of an exemplary prime editor fusion protein comprising a DNA binding domain (e.g., Cas9(H840A)) and a reverse transcriptase (e.g., a variant MMLV RT) having the following structure: [NLS]-[Cas9 (R221K N394K H840A)]-[linker]-[MMLV_RT(D200N)(T330P)(L603W)(T306K)(W313F)] and its components are shown in Table 13.

[0195] Polypeptides comprising components of a prime editor may be fused via peptide linkers, or may be provided in trans relevant to each other. For example, a reverse transcriptase may be expressed, delivered, or otherwise provided as an individual component rather than as a part of a fusion protein with the DNA binding domain. In such cases, components of the prime editor may be associated through non-peptide linkages or co-localization functions. In some embodiments, a prime editor further comprises additional components capable of interacting with, associating with, or capable of recruiting other components of the prime editor or the prime editing system. For example, a prime editor may comprise an RNA-protein recruitment polypeptide that can associate with an RNA-protein recruitment RNA aptamer. In some embodiments, an RNA-protein recruitment polypeptide can recruit, or be recruited by, a specific RNA sequence. Non limiting examples of RNA-protein recruitment polypeptide and RNA aptamer pairs include a MS2 coat protein and a MS2 RNA hairpin, a PCP polypeptide and a PP7 RNA hairpin, a Com polypeptide and a Com RNA hairpin, a Ku protein and a telomerase Ku binding RNA motif, and a Sm7 protein and a telomerase Sm7 binding RNA motif. In some embodiments, the prime editor comprises a DNA binding domain fused or linked to an RNA-protein recruitment polypeptide. In some embodiments, the prime editor comprises a DNA polymerase domain fused or linked to an RNA-protein recruitment polypeptide. In some embodiments, the DNA binding domain and the DNA polymerase domain fused to the RNA-protein recruitment polypeptide, or the DNA binding domain fused to the RNA-protein recruitment polypeptide and the DNA polymerase domain are co-localized by the corresponding RNA-protein recruitment RNA aptamer of the RNA-protein recruitment polypeptide. In some embodiments, the corresponding RNA-protein recruitment RNA aptamer fused or linked to a portion of the PEgRNA or ngRNA. For example, an MS2 coat protein fused or linked to the DNA polymerase and a MS2 hairpin installed on the PEgRNA for co-localization of the DNA polymerase and the RNA-guided DNA binding domain (e.g., a Cas9 nickase). In certain embodiments, components of a prime editor are directly fused to each other. In certain embodiments, components of a prime editor are associated to each other via a linker.

[0196] In some embodiments, a prime editor comprises a polypeptide domain, an MS2 coat protein (MCP), that recognizes an MS2 hairpin. In some embodiments, the nucleotide sequence of the MS2 hairpin (or equivalently referred to as the “MS2 aptamer”) is: GCCAACATGAGGATCACCCATGTCTGCAGGGCC (SEQ ID NO: 1912). In some embodiments, the amino acid sequence of the MCP is:

(SEQ ID NO: 1913)
GSASNFTQFVLVDNGGTGDVTVAPSNFANGVAEWISSNSRSQAYKVTCSV
RQSSAQNRKYTIKVEVPKVATQTVGGEELPVAGWRSYLNMELTIPIFATN
SDCELIVKAMQGLLKDGNPIPSAIAANSGIY.

[0197] As used herein, a linker can be any chemical group or a molecule linking two molecules or moieties, e.g., a DNA binding domain and a polymerase domain of a prime editor. In some embodiments, a linker is an organic molecule, group, polymer, or chemical moiety. In some embodiments, the linker comprises a non-peptide moiety. The linker may be as simple as a covalent bond, or it may be a polymeric linker many atoms in length, for example, a polynucleotide sequence. In certain embodiments, the linker is a covalent bond (e.g., a carbon-carbon bond, disulfide bond, carbon-heteroatom bond, etc.).

[0198] In certain embodiments, two or more components of a prime editor are linked to each other by a peptide linker. In some embodiments, a peptide linker is 5-100 amino acids in length, for example, 2,3,4,5, 6, 7, 8, 9, 10, 11, 12, 13, 14, 15, 16, 17, 18, 19, 20, 21, 22, 23, 24, 25, 26, 27, 28, 29, 30, 30-35, 35-40, 40-45, 45-50, 50-60, 60-70, 70-80, 80-90, 90-100, 100-150, or 150-200 amino acids in length. In some embodiments, the peptide linker is 16 amino acids in length, 24 amino acids in length, 64 amino acids in length, or 96 amino acids in length.

[0199] In some embodiments, the linker comprises the amino acid sequence (GGGGS)n (SEQ ID NO: 1914), (G)n (SEQ ID NO: 1915), (EAAAK)n (SEQ ID NO: 1916), (GGS)n (SEQ ID NO: 1917), (SGGS)n (SEQ ID NO: 1918), (XP)n (SEQ ID NO: 1919), or any combination thereof, wherein n is independently an integer between 1 and 30, and wherein X is any amino acid. In some embodiments, the linker comprises the amino acid sequence (GGS)n (SEQ ID NO: 1917), wherein n is 1, 3, or 7. In some embodiments, the linker comprises the amino acid sequence SGSETPGTSESATPES (SEQ ID NO: 1920). In some embodiments, the linker comprises the amino acid sequence SGGSSGGSSGSETPGTSESATPESSGGSSGGS (SEQ ID NO: 1921). In some embodiments, the linker comprises the amino acid sequence SGGSGGSGGS (SEQ ID NO: 1922). In some embodiments, the linker comprises the amino acid sequence SGGS (SEQ ID NO: 1923). In other embodiments, the linker comprises the amino acid sequence SGGSSGGSSGSETPGTSESATPESAGSYPYDVPDYAGSAAPAAKKKKLDGSGSGGSSGGS (SEQ ID NO: 1924).

[0200] In some embodiments, a linker comprises 1-100 amino acids. In some embodiments, the linker comprises the amino acid sequence GGSGGS (SEQ ID NO: 1925), GGSGGSGGS (SEQ ID NO: 1926), or SGGSSGGSSGSETPGTSESATPESSGGSSGGSS (SEQ ID NO: 1927).

[0201] In certain embodiments, two or more components of a prime editor are linked to each other by a non-peptide linker. In some embodiments, the linker is a carbon-nitrogen bond of an amide linkage. In certain embodiments, the linker is a cyclic or acyclic, substituted or unsubstituted, branched or unbranched aliphatic or heteroaliphatic linker. In certain embodiments, the linker is polymeric (e.g., polyethylene, polyethylene glycol, polyamide, polyester, etc.). In certain embodiments, the linker comprises a monomer, dimer, or polymer of aminoalkanoic acid. In certain embodiments, the linker comprises an aminoalkanoic acid (e.g., glycine, ethanoic acid, alanine, beta-alanine, 3-aminopropanoic acid, 4-aminobutanoic acid, 5-pentanoic acid, etc.). In certain embodiments, the linker comprises a monomer, dimer, or polymer of aminohexanoic acid (Ahx). In certain embodiments, the linker is based on a carbocyclic moiety (e.g., cyclopentane, cyclohexane). In other embodiments, the linker comprises a polyethylene glycol moiety (PEG). In certain embodiments, the linker comprises an aryl or heteroaryl moiety. In certain embodiments, the linker is based on a phenyl ring. The linker may include functionalized moieties to facilitate attachment of a nucleophile (e.g., thiol, amino) from the peptide to the linker. Any electrophile may be used as part of the linker. Exemplary electrophiles include, but are not limited to, activated esters, activated amides, Michael acceptors, alkyl halides, aryl halides, acyl halides, and isothiocyanates.

[0202] Components of a prime editor may be connected to each other in any order. In some embodiments, the DNA binding domain and the DNA polymerase domain of a prime editor may be fused to form a fusion protein, or may be joined by a peptide or protein linker, in any order from the N terminus to the C terminus. In some embodiments, a prime editor comprises a DNA binding domain fused or linked to the C-terminal end of a DNA polymerase domain. In some embodiments, a prime editor comprises a DNA binding domain fused or linked to the N-terminal end of a DNA polymerase domain. In some embodiments, the prime editor comprises a fusion protein comprising the structure NH2-[DNA binding domain]-[polymerase]-COOH; or NH2-[polymerase]-[DNA binding domain]-COOH, wherein each instance of”]-[“indicates the presence of an optional linker sequence. In some embodiments, a prime editor comprises a fusion protein and a DNA polymerase domain provided in trans, wherein the fusion protein comprises the structure NH2-[DNA binding domain]-[RNA-protein recruitment polypeptide]-COOH. In some embodiments, a prime editor comprises a fusion protein and a DNA binding domain provided in trans, wherein the fusion protein comprises the structure NH2-[DNA polymerase domain]-[RNA-protein recruitment polypeptide]-COOH.

[0203] In some embodiments, a prime editor fusion protein, a polypeptide component of a prime editor, or a polynucleotide encoding the prime editor fusion protein or polypeptide component, may be split into an N-terminal half and a C-terminal half or polypeptides that encode the N-terminal half and the C terminal half, and provided to a target DNA in a cell separately. For example, in certain embodiments, a prime editor fusion protein may be split into a N-terminal and a C-terminal half for separate delivery in AAV vectors, and subsequently translated and colocalized in a target cell to reform the complete polypeptide or prime editor protein. In such cases, separate halves of a protein or a fusion protein may each comprise a split-intein to facilitate colocalization and reformation of the complete protein or fusion protein by the mechanism of intein facilitated trans splicing. In some embodiments, a prime editor comprises a N-terminal half fused to an intein-N, and a C-terminal half fused to an intein-C, or polynucleotides or vectors (e.g., AAV vectors) encoding each thereof. When delivered and/or expressed in a target cell, the intein-N and the intein-C can be excised via protein trans-splicing, resulting in a complete prime editor fusion protein in the target cell. In some embodiments, an exemplary protein described herein may lack a methionine residue at the N-terminus.

[0204] In some embodiments, a prime editor fusion protein comprises a Cas9(H840A) nickase and a wild type M-MLV RT. In some embodiments, a prime editor fusion protein comprises a Cas9(H840A) nickase and a M-MLV RT that comprises amino acid substitutions D200N, T330P, T306K, W313F, and L603W compared to a wild type M-MLV RT. In some embodiments, a prime editor fusion protein comprises a Cas9(H840A) nickase and a M-MLV RT that comprises amino acid substitutions D200N, T330P, T306K, W313F, and L603W compared to a wild type M-MLV RT. The amino acid sequence of an exemplary prime editor fusion protein and its individual components in shown in Table 12. In some embodiments, a prime editor fusion protein comprises a Cas9 (R221K N394K H840A) nickase and a M-MLV RT that comprises amino acid substitutions D200N, T330P, T306K, W313F, and L603W compared to a wild type M-MLV RT. The amino acid sequence of an exemplary Prime editor fusion protein and its individual components in shown in Table 13. In some embodiments an exemplary prime editor protein may comprise an amino acid sequence as set forth in any of the SEQ ID NO: 1931 or SEQ ID NO: 1932.

[0205] In various embodiments, a prime editor fusion protein comprises an amino acid sequence that is at least about 700% identical, at least about 800% identical, at least about 900% identical, at least about 95% identical, at least about 960% identical, at least about 970% identical, at least about 980% identical, at least about 990% identical, at least about 99.50% identical, or at least about 99.90% identical to PE1, PE2, or any of the prime editor fusion sequences described herein or known in the art.

TABLE 12
lists exemplary prime editor and its components

| SEQ | | |
|---|---|---|
| ID | | |
| NO: | DESCRIPTION | SEQUENCE |
| 1931 | Exemplary Prime Editor | MKRTADGSEFESPKKKRKVDKKYSIGLDIGTNSVGWAVITDEYKVP |
| | [NLS]- [Cas9(H840A)]- | SKKFKVLGNTDRHSIKKNLIGALLFDSGETAEATRLKRTARRRYT |
| | [linker]- | RRKNRICYLQEIFSNEMAKVDDSFFHRLEESFLVEEDKKHERHPIF |
| | [MMLV_RT(D200N)(T330P) | GNIVDEVAYHEKYPTIYHLRKKLVDSTDKADLRLIYLALAHMIKF |
| | (L603W)(T306K) | RGHFLIEGDLNPDNSDVDKLFIQLVQTYNQLFEENPINASGVDAK |
| | (W313F)] - [NLS] | AILSARLSKSRRLENLIAQLPGEKKNGLFGNLIALSLGLTPNFKSN |
| | | FDLAEDAKLQLSKDTYDDDLDNLLAQIGDQYADLFLAAKNLSDAI |
| | | LLSDILRVNTEITKAPLSASMIKRYDEHHQDLTLLKALVRQQLPE |
| | | KYKEIFFDQSKNGYAGYIDGGASQEEFYKFIKPILEKMDGTEELL |
| | | VKLNREDLLRKQRTFDNGSIPHQIHLGELHAILRRQEDFYPFLKD |
| | | NREKIEKILTFRIPYYVGPLARGNSRFAWMTRKSEETITPWNFEEV |
| | | VDKGASAQSFIERMTNFDKNLPNEKVLPKHSLLYEYFTVYNELTK |
| | | VKYVTEGMRKPAFLSGEQKKAIVDLLFKTNRKVTVKQLKEDYFK |
| | | KIECFDSVEISGVEDRFNASLGTYHDLLKIIKDKDFLDNEENEDILE |
| | | DIVLTLTLFEDREMIEERLKTYAHLFDDKVMKQLKRRRYTGWGR |
| | | LSRKLINGIRDKQSGKTILDFLKSDGFANRNFMQLIHDDSLTFKED |
| | | IQKAQVSGQGDSLHEHIANLAGSPAIKKGILQTVKVVDELVKVMG |
| | | RHKPENIVIEMARENQTTQKGQKNSRERMKRIEEGIKELGSQILK |
| | | EHPVENTQLQNEKLYLYYLQNGRDMYVDQELDINRLSDYDVDAI |
| | | VPQSFLKDDSIDNKVLTRSDKNRGKSDNVPSEEVVKKMKNYWRQ |
| | | LLNAKLITQRKFDNLTKAERGGLSELDKAGFIKRQLVETRQITKH |
| | | VAQILDSRMNTKYDENDKLIREVKVITLKSKLVSDFRKDFQFYKV |
| | | REINNYHHAHDAYLNAVVGTALIKKYPKLESEFVYGDYKVYDVR |
| | | KMIAKSEQEIGKATAKYFFYSNIMNFFKTEITLANGEIRKRPLIET |
| | | NGETGEIVWDKGRDFATVRKVLSMPQVNIVKKTEVQTGGFSKES |
| | | ILPKRNSDKLIARKKDWDPKKYGGFDSPTVAYSVLVVAKVEKGK |
| | | SKKLKSVKELLGITIMERSSFEKNPIDFLEAKGYKEVKKDLIIKLP |
| | | KYSLFELENGRKRMLASAGELQKGNELALPSKYVNFLYLASHYE |
| | | KLKGSPEDNEQKQLFVEQHKHYLDEIIEQISEFSKRVILADANLDK |
| | | VLSAYNKHRDKPIREQAENIIHLFTLTNLGAPAAFKYFDTTIDRKR |
| | | YTSTKEVLDATLIHQSITGLYETRIDLSQLGGDSGGSSGGSSGSETP |
| | | GTSESATPESSGGSSGGSSTLNIEDEYRLHETSKEPDVSLGSTWLSDFPQ |
| | | AWAETGGMGLAVRQAPLIIPLKATSTPVSIKQYPMSQEARLGIKPHIQRLL |
| | | DQGILVPCQSPWNTPLLPVKKPGTNDYRPVQDLREVNKRVEDIHPTVPNP |
| | | YNLLSGLPPSHQWYTVLDLKDAFFCLRLHPTSQPLFAFEWRDPEMGISGQ |
| | | LTWTRLPQGFKNSPTLFNEALHRDLADFRIQHPDLILLQYVDDLLLAATSE |
| | | LDCQQGTRALLQTLGNLGYRASAKKAQICQKQVKYLGYLLKEGQRWLTE |
| | | ARKETVMGQPTPKTPRQLREFLGKAGFCRLFIPGFAEMAAPLYPLTKPGT |
| | | LFNWGPDQQKAYQEIKQALLTAPALGLPDLTKPFELFVDEKQGYAKGVL |
| | | TQKLGPWRRPVAYLSKKLDPVAAGWPPCLRMVAAIAVLTKDAGKLTMGQ |
| | | PLVILAPHAVEALVKQPPDRWLSNARMTHYQALLLDTDRVQFGPVVALNP |
| | | ATLLPLPEEGLQHNCLDILAEAHGTRPDLTDQPLPDADHTWYTDGSSLLQ |
| | | EGQRKAGAAVTTETEVIWAKALPAGTSAQRAELIALTQALKMAEGKKLNV |
| | | YTDSRYAFATAHIHGEIYRRRGWLTSEGKEIKNKDEILALLKALFLPKRLSII |
| | | HCPGHQKGHSAEARGNRMADQAARKAAITETPDTSTLLIENSSPSGGSKR |
| | | TADGSEFEPKKKRKV |
| | | KEY: |
| | | NUCLEAR LOCALIZATION SEQUENCE (NLS) |
| | | CAS9(H840A) |
| | | 33-AMINO ACID LINKER |
| | | M-MLV REVERSE TRANSCRIPTASE |
| 1902 | N-terminal NLS | MKRTADGSEFESPKKKRKV |
| 1867 | CAS9 (H840A)(MET | DKKYSIGLDIGTNSVGWAVITDEYKVPSKKFKVLGNTDRHSIKKNLIG |
| | MINUS) | ALLFDSGETAEATRLKRTARRRYTRRKNRICYLQEIFSNEMAKVDDSF |
| | | FHRLEESFLVEEDKKHERHPIFGNIVDEVAYHEKYPTIYHLRKKLVDS |
| | | TDKADLRLIYLALAHMIKFRGHFLIEGDLNPDNSDVDKLFIQLVQTYN |
| | | QLFEENPINASGVDAKAILSARLSKSRRLENLIAQLPGEKKNGLFGNLI |
| | | ALSLGLTPNFKSNFDLAEDAKLQLSKDTYDDDLDNLLAQIGDQYADL |
| | | FLAAKNLSDAILLSDILRVNTEITKAPLSASMIKRYDEHHQDLTLLKAL |
| | | VRQQLPEKYKEIFFDQSKNGYAGYIDGGASQEEFYKFIKPILEKMDGT |
| | | EELLVKLNREDLLRKQRTFDNGSIPHQIHLGELHAILRRQEDFYPFLKD |
| | | NREKIEKILTFRIPYYVGPLARGNSRFAWMTRKSEETITPWNFEEVVD |
| | | KGASAQSFIERMTNFDKNLPNEKVLPKHSLLYEYFTVYNELTKVKYV |
| | | TEGMRKPAFLSGEQKKAIVDLLFKTNRKVTVKQLKEDYFKKIECFDS |
| | | VEISGVEDRFNASLGTYHDLLKIIKDKDFLDNEENEDILEDIVLTLTLFE |
| | | DREMIEERLKTYAHLFDDKVMKQLKRRRYTGWGRLSRKLINGIRDK |
| | | QSGKTILDFLKSDGFANRNFMQLIHDDSLTFKEDIQKAQVSGQGDSLH |
| | | EHIANLAGSPAIKKGILQTVKVVDELVKVMGRHKPENIVIEMARENQ |
| | | TTQKGQKNSRERMKRIEEGIKELGSQILKEHPVENTQLQNEKLYLYYL |
| | | QNGRDMYVDQELDINRLSDYDVDAIVPQSFLKDDSIDNKVLTRSDKN |
| | | RGKSDNVPSEEVVKKMKNYWRQLLNAKLITQRKFDNLTKAERGGLS |
| | | ELDKAGFIKRQLVETRQITKHVAQILDSRMNTKYDENDKLIREVKVIT |
| | | LKSKLVSDFRKDFQFYKVREINNYHHAHDAYLNAVVGTALIKKYPKL |
| | | ESEFVYGDYKVYDVRKMIAKSEQEIGKATAKYFFYSNIMNFFKTEITL |
| | | ANGEIRKRPLIETNGETGEIVWDKGRDFATVRKVLSMPQVNIVKKTE |
| | | VQTGGFSKESILPKRNSDKLIARKKDWDPKKYGGFDSPTVAYSVLVV |
| | | AKVEKGKSKKLKSVKELLGITIMERSSFEKNPIDFLEAKGYKEVKKDL |
| | | IIKLPKYSLFELENGRKRMLASAGELQKGNELALPSKYVNFLYLASHY |
| | | EKLKGSPEDNEQKQLFVEQHKHYLDEIIEQISEFSKRVILADANLDKV |
| | | LSAYNKHRDKPIREQAENIIHLFTLTNLGAPAAFKYFDTTIDRKRYTST |
| | | KEVLDATLIHQSITGLYETRIDLSQLGGD |
| 1927 | linker between CAS9 | SGGSSGGSSGSETPGTSESATPESSGGSSGGSS |
| | domain and RT domain | |
| | (33 amino acids) | |
| 1864 | MMLV_RT D200N | TLNIEDEYRLHETSKEPDVSLGSTWLSDFPQAWAETGGMGLAVRQAP |
| | T330P L603W T306K | LIIPLKATSTPVSIKQYPMSQEARLGIKPHIQRLLDQGILVPCQSPWNTP |
| | W313F | LLPVKKPGTNDYRPVQDLREVNKRVEDIHPTVPNPYNLLSGLPPSHQ |
| | | WYTVLDLKDAFFCLRLHPTSQPLFAFEWRDPEMGISGQLTWTRLPQG |
| | | FKNSPTLFNEALHRDLADFRIQHPDLILLQYVDDLLLAATSELDCQQG |
| | | TRALLQTLGNLGYRASAKKAQICQKQVKYLGYLLKEGQRWLTEARK |
| | | ETVMGQPTPKTPRQLREFLGKAGFCRLFIPGFAEMAAPLYPLTKPGTL |
| | | FNWGPDQQKAYQEIKQALLTAPALGLPDLTKPFELFVDEKQGYAKG |
| | | VLTQKLGPWRRPVAYLSKKLDPVAAGWPPCLRMVAAIAVLTKDAG |
| | | KLTMGQPLVILAPHAVEALVKQPPDRWLSNARMTHYQALLLDTDRV |
| | | QFGPVVALNPATLLPLPEEGLQHNCLDILAEAHGTRPDLTDQPLPDAD |
| | | HTWYTDGSSLLQEGQRKAGAAVTTETEVIWAKALPAGTSAQRAELIA |
| | | LTQALKMAEGKKLNVYTDSRYAFATAHIHGEIYRRRGWLTSEGKEIK |
| | | NKDEILALLKALFLPKRLSIIHCPGHQKGHSAEARGNRMADQAARKA |
| | | AITETPDTSTLLIENSSP |
| 1911 | C- terminal NLS | SGGSKRTADGSEFEPKKKRKV |

TABLE 13
lists exemplary prime editor and its components

| SEQ ID | | |
|---|---|---|
| NO. | DESCRIPTION | SEQUENCE |
| 1932 | Exemplary prime editor | MKRTADGSEFESPKKKRKVDKKYSIGLDIGTNSVGWAVITDEYK |
| | [NLS]- [Cas9((R220K) | VPSKKFKVLGNTDRHSIKKNLIGALLFDSGETAEATRLKRTARR |
| | (R393K)(H839A)]- | RYTRRKNRICYLQEIFSNEMAKVDDSFFHRLEESFLVEEDKKHE |
| | [linker]- | RHPIFGNIVDEVAYHEKYPTIYHLRKKLVDSTDKADLRLIYLAL |
| | [MMLV_RT(D200N) | AHMIKFRGHFLIEGDLNPDNSDVDKLFIQLVQTYNQLFEENPIN |
| | (T330P)(L603W)(T306K) | ASGVDAKAILSARLSKSRKLENLIAQLPGEKKNGLFGNLIALSLG |
| | (W313F)] - [NLS] | LTPNFKSNFDLAEDAKLQLSKDTYDDDLDNLLAQIGDQYADLFL |
| | | AAKNLSDAILLSDILRVNTEITKAPLSASMIKRYDEHHQDLTLLK |
| | | ALVRQQLPEKYKEIFFDQSKNGYAGYIDGGASQEEFYKFIKPILE |
| | | KMDGTEELLVKLKREDLLRKQRTFDNGSIPHQIHLGELHAILR |
| | | RQEDFYPFLKDNREKIEKILTFRIPYYVGPLARGNSRFAWMTRK |
| | | SEETITPWNFEEVVDKGASAQSFIERMTNFDKNLPNEKVLPKHS |
| | | LLYEYFTVYNELTKVKYVTEGMRKPAFLSGEQKKAIVDLLFKT |
| | | NRKVTVKQLKEDYFKKIECFDSVEISGVEDRFNASLGTYHDLLK |
| | | IIKDKDFLDNEENEDILEDIVLTLTLFEDREMIEERLKTYAHLFD |
| | | DKVMKQLKRRRYTGWGRLSRKLINGIRDKQSGKTILDFLKSDG |
| | | FANRNFMQLIHDDSLTFKEDIQKAQVSGQGDSLHEHIANLAGSP |
| | | AIKKGILQTVKVVDELVKVMGRHKPENIVIEMARENQTTQKGQ |
| | | KNSRERMKRIEEGIKELGSQILKEHPVENTQLQNEKLYLYYLQN |
| | | GRDMYVDQELDINRLSDYDVDAIVPQSFLKDDSIDNKVLTRSDK |
| | | NRGKSDNVPSEEVVKKMKNYWRQLLNAKLITQRKFDNLTKAE |
| | | RGGLSELDKAGFIKRQLVETRQITKHVAQILDSRMNTKYDEND |
| | | KLIREVKVITLKSKLVSDFRKDFQFYKVREINNYHHAHDAYLNA |
| | | VVGTALIKKYPKLESEFVYGDYKVYDVRKMIAKSEQEIGKATA |
| | | KYFFYSNIMNFFKTEITLANGEIRKRPLIETNGETGEIVWDKGRD |
| | | FATVRKVLSMPQVNIVKKTEVQTGGFSKESILPKRNSDKLIARK |
| | | KDWDPKKYGGFDSPTVAYSVLVVAKVEKGKSKKLKSVKELLGI |
| | | TIMERSSFEKNPIDFLEAKGYKEVKKDLIIKLPKYSLFELENGRK |
| | | RMLASAGELQKGNELALPSKYVNFLYLASHYEKLKGSPEDNEQ |
| | | KQLFVEQHKHYLDEIIEQISEFSKRVILADANLDKVLSAYNKHR |
| | | DKPIREQAENIIHLFTLTNLGAPAAFKYFDTTIDRKRYTSTKEVL |
| | | DATLIHQSITGLYETRIDLSQLGGDSGGSSGGSKRTADGSEFESP |
| | | KKKRKVSGGSSGGSTLNIEDEYRLHETSKEPDVSLGSTWLSDFPQAW |
| | | AETGGMGLAVRQAPLIIPLKATSTPVSIKQYPMSQEARLGIKPHIQRLLD |
| | | QGILVPCQSPWNTPLLPVKKPGTNDYRPVQDLREVNKRVEDIHPTVPN |
| | | PYNLLSGLPPSHQWYTVLDLKDAFFCLRLHPTSQPLFAFEWRDPEMGIS |
| | | GQLTWTRLPQGFKNSPTLFNEALHRDLADFRIQHPDLILLQYVDDLLLA |
| | | ATSELDCQQGTRALLQTLGNLGYRASAKKAQICQKQVKYLGYLLKEGQ |
| | | RWLTEARKETVMGQPTPKTPRQLREFLGKAGFCRLFIPGFAEMAAPLY |
| | | PLTKPGTLFNWGPDQQKAYQEIKQALLTAPALGLPDLTKPFELFVDEK |
| | | QGYAKGVLTQKLGPWRRPVAYLSKKLDPVAAGWPPCLRMVAAIAVLTK |
| | | DAGKLTMGQPLVILAPHAVEALVKQPPDRWLSNARMTHYQALLLDTDR |
| | | VQFGPVVALNPATLLPLPEEGLQHNCLDILAEAHGTRPDLTDQPLPDA |
| | | DHTWYTDGSSLLQEGQRKAGAAVTTETEVIWAKALPAGTSAQRAELIAL |
| | | TQALKMAEGKKLNVYTDSRYAFATAHIHGEIYRRRGWLTSEGKEIKNKD |
| | | EILALLKALFLPKRLSIIHCPGHQKGHSAEARGNRMADQAARKAAITETP |
| | | DTSTLLIENSSPSGGSKRTADGSEFESPKKKRKVGSGPAAKRVKLD |
| | | KEY: |
| | | N-terminal bipartiteSV40NLS |
| | | CAS9(R221K N394K H840A) |
| | | SGGSx2-met-bpSV40NLS-SGGSx2 LINKER |
| | | M-MLV D200N T306K W313F T330P L603W REVERSE |
| | | TRANSCRIPTASE |
| | | C-terminal linker- NLS1 |
| | | C-terminal linker-NLS2 |
| 1902 | N-terminal | MKRTADGSEFESPKKKRKV |
| | bpSV40NLS | |
| 1868 | CAS9 (R221K | DKKYSIGLDIGTNSVGWAVITDEYKVPSKKFKVLGNTDRHSIKKNLI |
| | N394K H840A) | GALLFDSGETAEATRLKRTARRRYTRRKNRICYLQEIFSNEMAKVD |
| | | DSFFHRLEESFLVEEDKKHERHPIFGNIVDEVAYHEKYPTIYHLRKK |
| | | LVDSTDKADLRLIYLALAHMIKFRGHFLIEGDLNPDNSDVDKLFIQL |
| | | VQTYNQLFEENPINASGVDAKAILSARLSKSRKLENLIAQLPGEKKN |
| | | GLFGNLIALSLGLTPNFKSNFDLAEDAKLQLSKDTYDDDLDNLLAQI |
| | | GDQYADLFLAAKNLSDAILLSDILRVNTEITKAPLSASMIKRYDEHH |
| | | QDLTLLKALVRQQLPEKYKEIFFDQSKNGYAGYIDGGASQEEFYKFI |
| | | KPILEKMDGTEELLVKLKREDLLRKQRTFDNGSIPHQIHLGELHAIL |
| | | RRQEDFYPFLKDNREKIEKILTFRIPYYVGPLARGNSRFAWMTRKSE |
| | | ETITPWNFEEVVDKGASAQSFIERMTNFDKNLPNEKVLPKHSLLYE |
| | | YFTVYNELTKVKYVTEGMRKPAFLSGEQKKAIVDLLFKTNRKVTV |
| | | KQLKEDYFKKIECFDSVEISGVEDRFNASLGTYHDLLKIIKDKDFLD |
| | | NEENEDILEDIVLTLTLFEDREMIEERLKTYAHLFDDKVMKQLKRR |
| | | RYTGWGRLSRKLINGIRDKQSGKTILDFLKSDGFANRNFMQLIHDD |
| | | SLTFKEDIQKAQVSGQGDSLHEHIANLAGSPAIKKGILQTVKVVDEL |
| | | VKVMGRHKPENIVIEMARENQTTQKGQKNSRERMKRIEEGIKELGS |
| | | QILKEHPVENTQLQNEKLYLYYLQNGRDMYVDQELDINRLSDYDV |
| | | DAIVPQSFLKDDSIDNKVLTRSDKNRGKSDNVPSEEVVKKMKNYW |
| | | RQLLNAKLITQRKFDNLTKAERGGLSELDKAGFIKRQLVETRQITKH |
| | | VAQILDSRMNTKYDENDKLIREVKVITLKSKLVSDFRKDFQFYKVR |
| | | EINNYHHAHDAYLNAVVGTALIKKYPKLESEFVYGDYKVYDVRK |
| | | MIAKSEQEIGKATAKYFFYSNIMNFFKTEITLANGEIRKRPLIETNGE |
| | | TGEIVWDKGRDFATVRKVLSMPQVNIVKKTEVQTGGFSKESILPKR |
| | | NSDKLIARKKDWDPKKYGGFDSPTVAYSVLVVAKVEKGKSKKLKS |
| | | VKELLGITIMERSSFEKNPIDFLEAKGYKEVKKDLIIKLPKYSLFELE |
| | | NGRKRMLASAGELQKGNELALPSKYVNFLYLASHYEKLKGSPEDN |
| | | EQKQLFVEQHKHYLDEIIEQISEFSKRVILADANLDKVLSAYNKHRD |
| | | KPIREQAENIIHLFTLTNLGAPAAFKYFDTTIDRKRYTSTKEVLDATL |
| | | IHQSITGLYETRIDLSQLGGD |
| 1928 | SGGSx2- | SGGSSGGSKRTADGSEFESPKKKRKVSGGSSGGS |
| | bpSV40NLS-SGGSx2 | |
| | linker | |
| 1864 | MMLV_RT D200N | TLNIEDEYRLHETSKEPDVSLGSTWLSDFPQAWAETGGMGLAVRQ |
| | T330P L603W T306K | APLIIPLKATSTPVSIKQYPMSQEARLGIKPHIQRLLDQGILVPCQSPW |
| | W313F | NTPLLPVKKPGTNDYRPVQDLREVNKRVEDIHPTVPNPYNLLSGLP |
| | | PSHQWYTVLDLKDAFFCLRLHPTSQPLFAFEWRDPEMGISGQLTWT |
| | | RLPQGFKNSPTLFNEALHRDLADFRIQHPDLILLQYVDDLLLAATSE |
| | | LDCQQGTRALLQTLGNLGYRASAKKAQICQKQVKYLGYLLKEGQR |
| | | WLTEARKETVMGQPTPKTPRQLREFLGKAGFCRLFIPGFAEMAAPL |
| | | YPLTKPGTLFNWGPDQQKAYQEIKQALLTAPALGLPDLTKPFELFV |
| | | DEKQGYAKGVLTQKLGPWRRPVAYLSKKLDPVAAGWPPCLRMVA |
| | | AIAVLTKDAGKLTMGQPLVILAPHAVEALVKQPPDRWLSNARMTH |
| | | YQALLLDTDRVQFGPVVALNPATLLPLPEEGLQHNCLDILAEAHGT |
| | | RPDLTDQPLPDADHTWYTDGSSLLQEGQRKAGAAVTTETEVIWAK |
| | | ALPAGTSAQRAELIALTQALKMAEGKKLNVYTDSRYAFATAHIHG |
| | | EIYRRRGWLTSEGKEIKNKDEILALLKALFLPKRLSIIHCPGHQKGHS |
| | | AEARGNRMADQAARKAAITETPDTSTLLIENSSP |
| 1929 | C-terminal linker-NLS | SGGSKRTADGSEFESPKKKRKV |
| 1930 | C-terminal linker-NLS2 | GSGPAAKRVKLD |

### PEgRNA for Editing of RHO Gene

[0206] The term “prime editing guide RNA”, or “PEgRNA”, refers to a guide polynucleotide that comprises one or more intended nucleotide edits for incorporation into the target DNA. In some embodiments, the PEgRNA associates with and directs a prime editor to incorporate the one or more intended nucleotide edits into the target gene via prime editing. “Nucleotide edit” or “intended nucleotide edit” refers to a specified deletion of one or more nucleotides at one specific position, insertion of one or more nucleotides at one specific position, substitution of a single nucleotide, or other alterations at one specific position to be incorporated into the sequence of the target gene. Intended nucleotide edit may refer to the edit on the editing template as compared to the sequence on the target strand of the target gene, or may refer to the edit encoded by the editing template on the newly synthesized single stranded DNA that replaces the editing target sequence, as compared to the editing target sequence. In some embodiments, a PEgRNA comprises a spacer sequence that is complementary or substantially complementary to a search target sequence on a target strand of the target gene. In some embodiments, the PEgRNA comprises a gRNA core that associates with a DNA binding domain, e.g., a CRISPR-Cas protein domain, of a prime editor. In some embodiments, the PEgRNA further comprises an extended nucleotide sequence comprising one or more intended nucleotide edits compared to the endogenous sequence of the target gene, wherein the extended nucleotide sequence may be referred to as an extension arm.

[0207] In certain embodiments, the extension arm comprises a primer binding site sequence (PBS) that can initiate target-primed DNA synthesis. In some embodiments, the PBS is complementary or substantially complementary to a free 3′ end on the edit strand of the target gene at a nick site generated by the prime editor. In some embodiments, the extension arm further comprises an editing template that comprises one or more intended nucleotide edits to be incorporated in the target gene by prime editing. In some embodiments, the editing template is a template for an RNA-dependent DNA polymerase domain or polypeptide of the prime editor, for example, a reverse transcriptase domain. The reverse transcriptase editing template may also be referred to herein as an RT template, or RTT. In some embodiments, the editing template comprises partial complementarity to an editing target sequence in the target gene, e.g., an RHO gene. In some embodiments, the editing template comprises substantial or partial complementarity to the editing target sequence except at the position of the intended nucleotide edits to be incorporated into the target gene. An exemplary architecture of a PEgRNA including its components is as demonstrated in FIG. 2.

[0208] In some embodiments, a PEgRNA includes only RNA nucleotides and forms an RNA polynucleotide. In some embodiments, a PEgRNA is a chimeric polynucleotide that includes both RNA and DNA nucleotides. For example, a PEgRNA can include DNA in the spacer sequence, the gRNA core, or the extension arm. In some embodiments, a PEgRNA comprises DNA in the spacer sequence. In some embodiments, the entire spacer sequence of a PEgRNA is a DNA sequence. In some embodiments, the PEgRNA comprises DNA in the gRNA core, for example, in a stem region of the gRNA core. In some embodiments, the PEgRNA comprises DNA in the extension arm, for example, in the editing template. An editing template that comprises a DNA sequence may serve as a DNA synthesis template for a DNA polymerase in a prime editor, for example, a DNA-dependent DNA polymerase. Accordingly, the PEgRNA may be a chimeric polynucleotide that comprises RNA in the spacer, gRNA core, and/or the PBS sequences and DNA in the editing template.

[0209] Components of a PEgRNA may be arranged in a modular fashion. In some embodiments, the spacer and the extension arm comprising a primer binding site sequence (PBS) and an editing template, e.g., a reverse transcriptase template (RTT), can be interchangeably located in the 5′ portion of the PEgRNA, the 3′ portion of the PEgRNA, or in the middle of the gRNA core. In some embodiments, a PEgRNA comprises a PBS and an editing template sequence in 5′ to 3′ order. In some embodiments, the gRNA core of a PEgRNA of this disclosure may be located in between a spacer and an extension am of the PEgRNA. In some embodiments, the gRNA core of a PEgRNA may be located at the 3′ end of a spacer. In some embodiments, the gRNA core of a PEgRNA may be located at the 5′ end of a spacer. In some embodiments, the gRNA core of a PEgRNA may be located at the 3′ end of an extension arm. In some embodiments, the gRNA core of a PEgRNA may be located at the 5′ end of an extension arm. In some embodiments, the PEgRNA comprises, from 5′ to 3′: a spacer, a gRNA core, and an extension arm. In some embodiments, the PEgRNA comprises, from 5′ to 3′: a spacer, a gRNA core, an editing template, and a PBS. In some embodiments, the PEgRNA comprises, from 5′ to 3′: an extension aim, a spacer, and a gRNA core. In some embodiments, the PEgRNA comprises, from 5′ to 3′: an editing target, a PBS, a spacer, and a gRNA core.

[0210] In some embodiments, a PEgRNA comprises a single polynucleotide molecule that comprises the spacer sequence, the gRNA core, and the extension arm. In some embodiments, a PEgRNA comprises multiple polynucleotide molecules, for example, two polynucleotide molecules. In some embodiments, a PEgRNA comprise a first polynucleotide molecule that comprises the spacer and a portion of the gRNA core, and a second polynucleotide molecule that comprises the rest of the gRNA core and the extension arm. In some embodiments, the gRNA core portion in the first polynucleotide molecule and the gRNA core portion in the second polynucleotide molecule are at least partly complementary to each other. In some embodiments, the PEgRNA may comprise a first polynucleotide comprising the spacer and a first portion of a gRNA core comprising, which may be also be referred to as a crRNA. In some embodiments, the PEgRNA comprise a second polynucleotide comprising a second portion of the gRNA core and the extension arm, wherein the second portion of the gRNA core may also be referred to as a trans-activating crRNA, or tracr RNA. In some embodiments, the crRNA portion and the tracr RNA portion of the gRNA core are at least partially complementary to each other. In some embodiments, the partially complementary portions of the crRNA and the tracr RNA form a lower stem, a bulge, and an upper stem, as exemplified in FIG. 3.

[0211] In some embodiments, a spacer sequence comprises a region that has substantial complementarity to a search target sequence on the target strand of a double stranded target DNA, e.g., an RHO gene. In some embodiments, the spacer sequence of a PEgRNA is identical or substantially identical to a protospacer sequence on the edit strand of the target gene (except that the protospacer sequence comprises thymine and the spacer sequence may comprise uracil). In some embodiments, the spacer sequence is at least about 70%, 75%, 80%, 85%, 90%, 95%, or 100% complementary to a search target sequence in the target gene. In some embodiments, the spacer comprises is substantially complementary to the search target sequence.

[0212] In some embodiments, the length of the spacer varies from about 10 to about 100 nucleotides. In some embodiments, the spacer is 16 nucleotides, 17 nucleotides, 18 nucleotides, 19 nucleotides, 20 nucleotides, 21 nucleotides, 22 nucleotides, 23 nucleotides, 24 nucleotides, or 25 nucleotides in length. In some embodiments, the spacer is from 15 nucleotides to 30 nucleotides in length, 15 to 25 nucleotides in length, 18 to 22 nucleotides in length, 10 to 20 nucleotides in length, or 20 to 30 nucleotides in length. In some embodiments, the spacer is 16 to 22 nucleotides in length, e.g., about 16, 17, 18, 19, 20, 21, or 22 nucleotides in length.

[0213] As used herein in a PEgRNA or a nick guide RNA sequence, or fragments thereof such as a spacer, PBS, or RTT sequence, unless indicated otherwise, it should be appreciated that the letter “T” or “thymine” indicates a nucleobase in a DNA sequence that encodes the PEgRNA or guide RNA sequence, and is intended to refer to a uracil (U) nucleobase of the PEgRNA or guide RNA or any chemically modified uracil nucleobase known in the art, such as 5-methoxyuracil.

[0214] The extension arm of a PEgRNA may comprise a primer binding site (PBS) and an editing template (e.g., an RTT). The extension arm may be partially complementary to the spacer. In some embodiments, the editing template (e.g., RTT) is partially complementary to the spacer. In some embodiments, the editing template (e.g., RTT) and the primer binding site (PBS) are each partially complementary to the spacer.

[0215] An extension arm of a PEgRNA may comprise a primer binding site sequence (PBS, or PBS sequence) that comprises complementarity to and can hybridize with a free 3′ end of a single stranded DNA in the target gene (e.g., the RHO gene) generated by nicking with a prime editor at the nick site on the PAM strand.

[0216] The length of the PBS sequence may vary depending on, e.g., the prime editor components, the search target sequence and other components of the PEgRNA.

[0217] In some embodiments, the PBS is about 3 to 19 nucleotides in length. in some embodiments, the PBS is about 3 to 17 nucleotides in length. In some embodiments, the PBS is about 4 to 16 nucleotides, about 6 to 16 nucleotides, about 6 to 18 nucleotides, about 6 to 20 nucleotides, about 8 to 20 nucleotides, about 10 to 20 nucleotides, about 12 to 20 nucleotides, about 14 to 20 nucleotides, about 16 to 20 nucleotides, or about 18 to 20 nucleotides in length. In some embodiments, the PBS is 8 to 17 nucleotides in length. In some embodiments, the PBS is 8 to 16 nucleotides in length. In some embodiments, the PBS is 8 to 15 nucleotides in length. In some embodiments, the PBS is 8 to 14 nucleotides in length. In some embodiments, the PBS is 8 to 13 nucleotides in length. In some embodiments, the PBS is 8 to 12 nucleotides in length. In some embodiments, the PBS is 8 to 11 nucleotides in length. In some embodiments, the PBS is 8 to 10 nucleotides in length. In some embodiments, the PBS is 8 or 9 nucleotides in length. In some embodiments, the PBS is 16 or 17 nucleotides in length. In some embodiments, the PBS is 15 to 17 nucleotides in length. In some embodiments, the PBS is 14 to 17 nucleotides in length. In some embodiments, the PBS is 13 to 17 nucleotides in length. In some embodiments, the PBS is 12 to 17 nucleotides in length. In some embodiments, the PBS is 11 to 17 nucleotides in length. In some embodiments, the PBS is 10 to 17 nucleotides in length. In some embodiments, the PBS is 9 to 17 nucleotides in length. In some embodiments, the PBS is about 7 to 15 nucleotides in length. In some embodiments, the PBS is 6, 7, 8, 9, 10, 11, 12, 13, 14, 15, 16, 17, 18, or 19 nucleotides in length. In some embodiments, the PBS is 8 to 14 nucleotides in length. For example, the PBS can be 8, 9, 10, 11, 12, 13, or 14 nucleotides in length. In some embodiments, the PBS is 11 or 12 nucleotides in length. In some embodiments, the PBS is 11 to 13 nucleotides in length. In some embodiments, the PBS is 11 to 14 nucleotides in length.

[0218] The PBS may be complementary or substantially complementary to a DNA sequence in the edit strand of the target gene. By annealing with the edit strand at a free hydroxy group, e.g., a free 3′ end generated by prime editor nicking, the PBS may initiate synthesis of a new single stranded DNA encoded by the editing template at the nick site. In some embodiments, the PBS is at least about 70%, 75%, 80%, 85%, 90%, 95%, or 100% complementary to a region of the edit strand of the target gene (e.g., the RHO gene). In some embodiments, the PBS is perfectly complementary, or 100% complementary, to a region of the edit strand of the target gene (e.g., the RHO gene).

[0219] An extension arm of a PEgRNA may comprise an editing template that serves as a DNA synthesis template for the DNA polymerase in a prime editor during prime editing.

[0220] The length of an editing template may vary depending on, e.g., the prime editor components, the search target sequence and other components of the PEgRNA. In some embodiments, the editing template serves as a DNA synthesis template for a reverse transcriptase, and the editing template is referred to as a reverse transcription editing template (RTT).

[0221] The editing template (e.g., RTT), in some embodiments, is 2, 3, 4, 5, 6, 7, 8, 9, 10, 11, 12, 13, 14, 15, 16, 17, 18, 19, 20, 21, 22, 23, 24, or 25 nucleotides in length. In some embodiments, the RTT is 12, 13, 14, 15, 16, 17, 18, 19, 20, 21, 22, 23, 24, or 25 nucleotides in length. In some embodiments, the RTT is 16, 17, 18, 19, 20, 21, 22, 23, 24, 25, 26, 27, 28, 29, 30, 31, 32, 33, 34, 35, 36, 37, 38, 39, or 40 nucleotides in length. In some embodiments, the RTT is 16, 17, 18, 19, 20, 21, 22, 23, 24, 25, 26, 27, 28, 29, 30, 31, 32, 33, 34, 35, 36, 37, 38, 39, 40, 41, 42, 43, 44, 45, 46, 47, 48, 49, 50, 51, 52, 53, 54, 55, 56, 57, 58, 59, 60, 61, 62, 63, 64, 65, 66, 67, 68, 69, 70, 71, 72, 73, 74, 75, 76, 77, 78, 79, or 80 nucleotides in length. In some embodiments, the RTT is 10 to 110 nucleotides in length. In some embodiments, the RTT is 10 to 109, 10 to 108, 10 to 107, 10 to 106, 10 to 105, 10 to 104, 10 to 103, 10 to 102, or 10 to 101 nucleotides in length. In some embodiments, the RTT is at least 8 and no more than 50 nucleotides in length. In some embodiments, the RTT is at least 8 and no more than 25 nucleotides in length. In some embodiments, the RTT is about 10 to about 20 nucleotides in length. In some embodiments, the RTT is about 11, 12, 13, 14, 15, 16, 17, 18, or 19 nucleotides in length. In some embodiments, the RTT is 11 to 17 nucleotides in length. In some embodiments, the RTT is 12 to 17 nucleotides in length. In some embodiments, the RTT is 12 to 16 nucleotides in length. In some embodiments, the RTT is 13 to 17 nucleotides in length. In some embodiments, the RTT is 11, 12, 13, 14, 15, 16, or 17 nucleotides in length. In some embodiments the RTT is 12 nucleotides in length. In some embodiments the RTT is 16 nucleotides in length. In some embodiments the RTT is 17 nucleotides in length.

[0222] In some embodiments, the editing template (e.g., RTT) sequence is about 70%, 75%, 80%, 85%, 90%, 95%, or 99% complementary to the editing target sequence on the edit strand of the target gene. In some embodiments, the editing template sequence (e.g., RTT) is substantially complementary to the editing target sequence. In some embodiments, the editing template sequence (e.g., RTT) is complementary to the editing target sequence except at positions of the intended nucleotide edits to be incorporated in the target gene. In some embodiments, the editing template comprises a nucleotide sequence comprising about 85% to about 95% complementarity to an editing target sequence in the edit strand in the target gene (e.g., the RHO gene). In some embodiments, the editing template comprises about 86%, about 87%, about 88%, about 89%, about 90%, about 91%, about 92%, about 93%, about 94%, about 95%, about 96%, about 97%, about 98%, or about 99% complementarity to an editing target sequence in the edit strand of the target gene (e.g., the RHO gene).

[0223] An intended nucleotide edit in an editing template of a PEgRNA may comprise various types of alterations as compared to the target gene sequence. In some embodiments, the nucleotide edit is a single nucleotide substitution as compared to the target gene sequence. In some embodiments, the nucleotide edit is a deletion as compared to the target gene sequence. In some embodiments, the nucleotide edit is an insertion as compared to the target gene sequence. In some embodiments, the editing template comprises one to ten intended nucleotide edits as compared to the target gene sequence. In some embodiments, the editing template comprises one or more intended nucleotide edits as compared to the target gene sequence. In some embodiments, the editing template comprises two or more intended nucleotide edits as compared to the target gene sequence. In some embodiments, the editing template comprises three or more intended nucleotide edits as compared to the target gene sequence. In some embodiments, the editing template comprises four or more, five or more, or six or more intended nucleotide edits as compared to the target gene sequence. In some embodiments, the editing template comprises two single nucleotide substitutions, insertions, deletions, or any combination thereof, as compared to the target gene sequence. In some embodiments, the editing template comprises three single nucleotide substitutions, insertions, deletions, or any combination thereof, as compared to the target gene sequence. In some embodiments, the editing template comprises four, five, or six single nucleotide substitutions, insertions, deletions, or any combination thereof, as compared to the target gene sequence. In some embodiments, a nucleotide substitution comprises an adenine (A)-to-thymine (T) substitution. In some embodiments, a nucleotide substitution comprises an A-to-guanine (G) substitution. In some embodiments, a nucleotide substitution comprises an A-to-cytosine (C) substitution. In some embodiments, a nucleotide substitution comprises a T-A substitution. In some embodiments, a nucleotide substitution comprises a T-G substitution. In some embodiments, a nucleotide substitution comprises a T-C substitution. In some embodiments, a nucleotide substitution comprises a G-to-A substitution. In some embodiments, a nucleotide substitution comprises a G-to-T substitution. In some embodiments, a nucleotide substitution comprises a G-to-C substitution. In some embodiments, a nucleotide substitution comprises a C-to-A substitution. In some embodiments, a nucleotide substitution comprises a C-to-T substitution. In some embodiments, a nucleotide substitution comprises a C-to-G substitution.

[0224] In some embodiments, a nucleotide insertion is at least 1, at least 2, at least 3, at least 4, at least 5 nucleotides, at least 6 nucleotides, at least 7 nucleotides, at least 8 nucleotides, at least 9 nucleotides, at least 10 nucleotides, at least 11 nucleotides, at least 12 nucleotides, at least 13 nucleotides, at least 14 nucleotides, at least 15 nucleotides, at least 16 nucleotides, at least 17 nucleotides, at least 18 nucleotides, at least 19 nucleotides, or at least 20 nucleotides in length. In some embodiments, a nucleotide insertion is from 1 to 2 nucleotides, from 1 to 3 nucleotides, from 1 to 4 nucleotides, from 1 to 5 nucleotides, form 2 to 5 nucleotides, from 3 to 5 nucleotides, from 3 to 6 nucleotides, from 3 to 8 nucleotides, from 4 to 9 nucleotides, from 5 to 10 nucleotides, from 6 to 11 nucleotides, from 7 to 12 nucleotides, from 8 to 13 nucleotides, from 9 to 14 nucleotides, from 10 to 15 nucleotides, from 11 to 16 nucleotides, from 12 to 17 nucleotides, from 13 to 18 nucleotides, from 14 to 19 nucleotides, from 15 to 20 nucleotides in length. In some embodiments, a nucleotide insertion is a single nucleotide insertion. In some embodiments, a nucleotide insertion comprises insertion of two nucleotides.

[0225] The editing template of a PEgRNA may comprise one or more intended nucleotide edits, compared to the RHO gene to be edited. Position of the intended nucleotide edit(s) relevant to other components of the PEgRNA, or to particular nucleotides (e.g., mutations) in the RHO target gene may vary. In some embodiments, the nucleotide edit is in a region of the PEgRNA corresponding to or homologous to the protospacer sequence. In some embodiments, the nucleotide edit is in a region of the PEgRNA corresponding to a region of the RHO gene outside of the protospacer sequence.

[0226] In some embodiments, the position of a nucleotide edit incorporation in the target gene may By “upstream” and “downstream” it is intended to define relevant positions at least two regions or sequences in a nucleic acid molecule orientated in a 5′-to-3′ direction. For example, a first sequence is upstream of a second sequence in a DNA molecule where the first sequence is positioned 5′ to the second sequence. Accordingly, the second sequence is downstream of the first sequence.

[0227] In some embodiments, the position of a nucleotide edit incorporation in the target gene can be determined based on position of the nick site. In some embodiments, position of an intended nucleotide edit is 0, 1, 2, 3, 4, 5, 6, 7, 8, 9, 10, 11, 12, 13, 14, 15, 16, 17, 18, 19, 20, 21, 22, 23, 24, 25, 26, 27, 28, 29, 30, 31, 32, 33, 34, 35, 36, 37, 38, 39, 40, 45, 50, 55, 60, 65, 70, 75, 80, 85, 90, 95, 100, 110, 120, 130, 140, or 150 nucleotides apart from the nick site. In some embodiments, position of an intended nucleotide edit is 0, 1, 2, 3, 4, 5, 6, 7, 8, 9, 10, 11, 12, 13, 14, 15, 16, 17, 18, 19, 20, 21, 22, 23, 24, 25, 26, 27, 28, 29, 30, 31, 32, 33, 34, 35, 36, 37, 38, 39, 40, 45, 50, 55, 60, 65, 70, 75, 80, 85, 90, 95, 100, 110, 120, 130, 140, or 150 nucleotides downstream of the nick site on the PAM strand (or the non-target strand, or the edit strand) of the double stranded target DNA. In some embodiments, position of the intended nucleotide edit in the editing template may be referred to by aligning the editing template with the partially complementary editing target sequence on the edit strand, and referring to nucleotide positions on the editing strand where the intended nucleotide edit is incorporated. Accordingly, in some embodiments, a nucleotide edit in an editing template is at a position corresponding to a position about 0, 1, 2, 3, 4, 5, 6, 7, 8, 9, 10, 11, 12, 13, 14, 15, 16, 17, 18, 19, 20, 21, 22, 23, 24, 25, 26, 27, 28, 29, 30, 31, 32, 33, 34, 35, 36, 37, 38, 39, 40, 45, 50, 55, 60, 65, 70, 75, 80, 85, 90, 95, 100, 110, 120, 130, 140, or 150 nucleotides apart from the nick site. In some embodiments, a nucleotide edit in an editing template is at a position corresponding to a position about 0 to 2 nucleotides, 0 to 4 nucleotides, 0 to 6 nucleotides, 0 to 8 nucleotides, 0 to 10 nucleotides, 2 to 4 nucleotides, 2 to 6 nucleotides, 2 to 8 nucleotides, 2 to 10 nucleotides, 2 to 12 nucleotides, 4 to 6 nucleotides, 4 to 8 nucleotides, 4 to 10 nucleotides, 4 to 12 nucleotides, 4 to 14 nucleotides, 6 to 8 nucleotides, 6 to 10 nucleotides, 6 to 12 nucleotides, 6 to 14 nucleotides, 6 to 16 nucleotides, 8 to 10 nucleotides, 8 to 12 nucleotides, 8 to 14 nucleotides, 8 to 16 nucleotides, 8 to 18 nucleotides, 10 to 12 nucleotides, 10 to 14 nucleotides, 10 to 16 nucleotides, 10 to 18 nucleotides, 10 to 20 nucleotides, 12 to 14 nucleotides, 12 to 16 nucleotides, 12 to 18 nucleotides, 12 to 20 nucleotides, 12 to 22 nucleotides, 14 to 16 nucleotides, 14 to 18 nucleotides, 14 to 20 nucleotides, 14 to 22 nucleotides, 14 to 24 nucleotides, 16 to 18 nucleotides, 16 to 20 nucleotides, 16 to 22 nucleotides, 16 to 24 nucleotides, 16 to 26 nucleotides, 18 to 20 nucleotides, 18 to 22 nucleotides, 18 to 24 nucleotides, 18 to 26 nucleotides, 18 to 28 nucleotides, 20 to 22 nucleotides, 20 to 24 nucleotides, 20 to 26 nucleotides, 20 to 28 nucleotides, 20 to 30 nucleotides, 30 to 40 nucleotides, 40 to 50 nucleotides, 50 to 60 nucleotides, 60 to 70 nucleotides, 70 to 80 nucleotides, 80 to 90 nucleotides, 90 to 100 nucleotides, 100 to 110 nucleotides, 110 to 120 nucleotides, 120 to 130 nucleotides, 130 to 140 nucleotides, or 140 to 150 nucleotides apart from the nick site. In some embodiments, when referred to in the context of the PAM strand (or the non-target strand, or the edit strand), a nucleotide edit in an editing template is at a position corresponding to a position about 0 to 2 nucleotides, 0 to 4 nucleotides, 0 to 6 nucleotides, 0 to 8 nucleotides, 0 to 10 nucleotides, 2 to 4 nucleotides, 2 to 6 nucleotides, 2 to 8 nucleotides, 2 to 10 nucleotides, 2 to 12 nucleotides, 4 to 6 nucleotides, 4 to 8 nucleotides, 4 to 10 nucleotides, 4 to 12 nucleotides, 4 to 14 nucleotides, 6 to 8 nucleotides, 6 to 10 nucleotides, 6 to 12 nucleotides, 6 to 14 nucleotides, 6 to 16 nucleotides, 8 to 10 nucleotides, 8 to 12 nucleotides, 8 to 14 nucleotides, 8 to 16 nucleotides, 8 to 18 nucleotides, 10 to 12 nucleotides, 10 to 14 nucleotides, 10 to 16 nucleotides, 10 to 18 nucleotides, 10 to 20 nucleotides, 12 to 14 nucleotides, 12 to 16 nucleotides, 12 to 18 nucleotides, 12 to 20 nucleotides, 12 to 22 nucleotides, 14 to 16 nucleotides, 14 to 18 nucleotides, 14 to 20 nucleotides, 14 to 22 nucleotides, 14 to 24 nucleotides, 16 to 18 nucleotides, 16 to 20 nucleotides, 16 to 22 nucleotides, 16 to 24 nucleotides, 16 to 26 nucleotides, 18 to 20 nucleotides, 18 to 22 nucleotides, 18 to 24 nucleotides, 18 to 26 nucleotides, 18 to 28 nucleotides, 20 to 22 nucleotides, 20 to 24 nucleotides, 20 to 26 nucleotides, 20 to 28 nucleotides, 20 to 30 nucleotides, 30 to 40 nucleotides, 40 to 50 nucleotides, 50 to 60 nucleotides, 60 to 70 nucleotides, 70 to 80 nucleotides, 80 to 90 nucleotides, 90 to 100 nucleotides, 100 to 110 nucleotides, 110 to 120 nucleotides, 120 to 130 nucleotides, 130 to 140 nucleotides, or 140 to 150 nucleotides downstream from the nick site. The relative positions of the intended nucleotide edit(s) and nick site may be referred to by numbers. For example, in some embodiments, the nucleotide immediately downstream of the nick site on a PAM strand (or the non-target strand, or the edit strand) may be referred to as at position 0. The nucleotide immediately upstream of the nick site on the PAM strand (or the non-target strand, or the edit strand) may be referred to as at position −1. The nucleotides downstream of position 0 on the PAM strand may be referred to as at positions +1, +2, +3, +4, . . . +n, and the nucleotides upstream of position −1 on the PAM strand may be referred to as at positions −2, −3, −4, . . . , −n. Accordingly, in some embodiments, the nucleotide in the editing template that corresponds to position 0 when the editing template is aligned with the partially complementary editing target sequence by complementarity may also be referred to as position 0 in the editing template, the nucleotides in the editing template corresponding to the nucleotides at positions +1, +2, +3, +4, . . . , +n on the PAM strand of the double stranded target DNA may also be referred to as at positions +1, +2, +3, +4, . . . , +n in the editing template, and the nucleotides in the editing template corresponding to the nucleotides at positions −1, −2, −3, −4, . . . , −n on the PAM strand on the double stranded target DNA may also be referred to as at positions −1, −2, −3, −4, . . . , −n on the editing template, even though when the PEgRNA is viewed as a standalone nucleic acid, positions +1, +2, +3, +4, . . . , +n are 5′ of position 0 and positions −1, −2, −3, −4, . . . −n are 3′ of position 0 in the editing template. In some embodiments, an intended nucleotide edit is at position +n of the editing template relative to position 0. Accordingly, the intended nucleotide edit may be incorporated at position +n of the PAM strand of the double stranded target DNA (and subsequently, the target strand of the double stranded target DNA) by prime editing. The corresponding positions of the intended nucleotide edit incorporated in the RHO gene may also be referred to based on the nicking position generated by a prime editor based on sequence homology and complementarity. For example, in embodiments, the distance between the nucleotide edit to be incorporated into the RHO gene and the nick site (also referred to as the “nick to edit distance”) may be determined by the position of the nick site and the position of the nucleotide(s) corresponding to the intended nucleotide edit(s), for example, by identifying sequence complementarity between the spacer and the search target sequence and sequence complementarity between the editing template and the editing target sequence. In certain embodiments, the position of the nucleotide edit can be in any position downstream of the nick site on the edit strand (or the PAM strand). As used herein, the distance between the nick site and the nucleotide edit, for example, where the nucleotide edit comprises an insertion or deletion, refers to the 5′ most position of the nucleotide edit for a nick that creates a 3′ free end on the edit strand (i.e., the “near position” of the nucleotide edit to the nick site). In some embodiments, the nick-to-edit distance is 2 to 106 nucleotides. In some embodiments, the nick-to-edit distance is 2 to 105, 2 to 104, 2 to 103, 2 to 102, 2 to 101, 2 to 100, 2 to 99, 2 to 98, or 2 to 97 nucleotides. In some embodiments, the nick-to-edit distance is 2 to 90, 2 to 80, 2 to 70, 2 to 60, 2 to 50, 2 to 40, or 2 to 30 nucleotides. In some embodiments, the nick-to-edit distance is 2 to 25, 2 to 20, 2 to 15, or 2 to 10 nucleotides. In some embodiments, the nick-to-edit distance is 2, 3, 4, 5, 6, or 7 nucleotides in length. In some embodiments, the nick-to-edit distance is 28 nucleotides. In some embodiments, the nick-to-edit distance is 22 nucleotides. In some embodiments, the nick-to-edit distance is 21 nucleotides. In some embodiments, the nick-to-edit distance is 17 nucleotides. In some embodiments, the nick-to-edit distance is 16 nucleotides. In some embodiments, the nick-to-edit distance is 4 nucleotides.

[0228] The RTT length and the nick-to-edit distance relate to the length of the portion of the RTT that is upstream of (i.e. 5′ to) the 5′-most edit in the RTT and is complementary to the edit strand. In some embodiments, the editing template comprises at least 4 contiguous nucleotides of complementarity with the edit strand wherein the at least 4 nucleotides contiguous are located upstream of the 5′ most edit in the editing template. In some embodiments, the editing template comprises at least 5, 6, 7, 8, 9, 10, 11, 12, 13, 14, 15, 16, 17, 18, 19, or more contiguous nucleotides of complementarity with the edit strand wherein the at least 5, 6, 7, 8, 9, 10, 11, 12, 13, 14, 15, 16, 17, 18, 19, or more contiguous nucleotides are located upstream of the 5′ most edit in the editing template. In some embodiments, the editing template comprises 20-25, 25-30, 30-35, 35-40, 45-45, or 45-50 contiguous nucleotides of complementarity with the edit strand wherein the 20-25, 25-30, 30-35, 35-40, 45-45, or 45-50 or more contiguous nucleotides are located upstream of the 5′ most edit in the editing template. In some embodiments, the editing template comprises 9-14 contiguous nucleotides of complementarity with the edit strand wherein the 9-14 contiguous nucleotides are located upstream of the 5′ most edit in the editing template. In some embodiments, the editing template comprises 6-10 contiguous nucleotides of complementarity with the edit strand wherein the 6-10 contiguous nucleotides are located upstream of the 5′ most edit in the editing template. In some embodiments, the editing template comprises 10 contiguous nucleotides of complementarity with the edit strand wherein the 10 contiguous nucleotides are located upstream of the 5′ most edit in the editing template. In some embodiments, the editing template comprises 9 contiguous nucleotides of complementarity with the edit strand wherein the 9 contiguous nucleotides are located upstream of the 5′ most edit in the editing template.

[0229] When referred to within the PEgRNA, positions of the one or more intended nucleotide edits may be referred to relevant to components of the PEgRNA. For example, an intended nucleotide edit may be 5′ or 3′ to the PBS. In some embodiments, a PEgRNA comprises the structure, from 5′ to 3′: a spacer, a gRNA core, an editing template, and a PBS. In some embodiments, the intended nucleotide edit is 0, 1, 2, 3, 4, 5, 6, 7, 8, 9, 10, 11, 12, 13, 14, 15, 16, 17, 18, 19, 20, 21, 22, 23, 24, 25, 26, 27, 28, 29, 30, 31, 32, 33, 34, 35, 36, 37, 38, 39, or 40 nucleotides upstream to the 5′ most nucleotide of the PBS. In some embodiments, the intended nucleotide edit is 0 to 2 nucleotides, 0 to 4 nucleotides, 0 to 6 nucleotides, 0 to 8 nucleotides, 0 to 10 nucleotides, 2 to 4 nucleotides, 2 to 6 nucleotides, 2 to 8 nucleotides, 2 to 10 nucleotides, 2 to 12 nucleotides, 4 to 6 nucleotides, 4 to 8 nucleotides, 4 to 10 nucleotides, 4 to 12 nucleotides, 4 to 14 nucleotides, 6 to 8 nucleotides, 6 to 10 nucleotides, 6 to 12 nucleotides, 6 to 14 nucleotides, 6 to 16 nucleotides, 8 to 10 nucleotides, 8 to 12 nucleotides, 8 to 14 nucleotides, 8 to 16 nucleotides, 8 to 18 nucleotides, 10 to 12 nucleotides, 10 to 14 nucleotides, 10 to 16 nucleotides, 10 to 18 nucleotides, 10 to 20 nucleotides, 12 to 14 nucleotides, 12 to 16 nucleotides, 12 to 18 nucleotides, 12 to 20 nucleotides, 12 to 22 nucleotides, 14 to 16 nucleotides, 14 to 18 nucleotides, 14 to 20 nucleotides, 14 to 22 nucleotides, 14 to 24 nucleotides, 16 to 18 nucleotides, 16 to 20 nucleotides, 16 to 22 nucleotides, 16 to 24 nucleotides, 16 to 26 nucleotides, 18 to 20 nucleotides, 18 to 22 nucleotides, 18 to 24 nucleotides, 18 to 26 nucleotides, 18 to 28 nucleotides, 20 to 22 nucleotides, 20 to 24 nucleotides, 20 to 26 nucleotides, 20 to 28 nucleotides, or 20 to 30 nucleotides upstream to the 5′ most nucleotide of the PBS.

[0230] The corresponding positions of the intended nucleotide edit incorporated in the target gene may also be referred to based on the nicking position generated by a prime editor based on sequence homology and complementarity. For example, in some embodiments, the distance between the nucleotide edit to be incorporated into the target RHO gene and the nick site (also referred to as the “nick to edit distance”) may be determined by the position of the nick site and the position of the nucleotide(s) corresponding to the intended nucleotide edit(s), for example, by identifying sequence complementarity between the spacer and the search target sequence and sequence complementarity between the editing template and the editing target sequence. In certain embodiments, the position of the nucleotide edit can be in any position downstream of the nick site on the edit strand (or the PAM strand) generated by the prime editor, such that the distance between the nick site and the intended nucleotide edit is 0, 1, 2, 3, 4, 5, 6, 7, 8, 9, 10, 11, 12, 13, 14, 15, 16, 17, 18, 19, 20, 21, 22, 23, 24, 25, 26, 27, 28, 29, or 30 nucleotides in length. In some embodiments, the position of the nucleotide edit is 0, 1, 2, 3, 4, 5, 6, 7, 8, 9, 10, 11, 12, 13, 14, 15, 16, 17, 18, 19, 20, 21, 22, 23, 24, 25, 26, 27, 28, 29, or 30 nucleotides in length. In some embodiments, the position of the nucleotide edit is 0, 1, 2, 3, 4, 5, 6, 7, 8, 9, 10, 11, 12, 13, 14, 15, 16, IT 18, 19, 20, 21, 22, 23, 24, 25, 26, 27, 28, 29, or 30 nucleotides upstream of the nick site on the edit strand. In some embodiments, the position of the nucleotide edit is 0, 1, 2, 3, 4, 5, 6, 7, 8, 9, 10, 11, 12, 13, 14, 15, 16, 17, 18, 19, 20, 21, 22, 23, 24, 25, 26, 27, 28, 29, or 30 nucleotides downstream of the nick site on the edit strand. In some embodiments, the position of the nucleotide edit is 0 base pair from the nick site on the edit strand, that is, the editing position is at the same position as the nick site. As used herein, the distance between the nick site and the nucleotide edit, for example, where the nucleotide edit comprises an insertion or deletion, refers to the 5′ most position of the nucleotide edit for a nick that creates a 3′ free end on the edit strand (i.e., the “near position” of the nucleotide edit to the nick site). Similarly, as used herein, the distance between the nick site and a PAM position edit, for example, where the nucleotide edit comprises an insertion, deletion, or substitution of two or more contiguous nucleotides, refers to the 5′ most position of the nucleotide edit and the 5′ most position of the PAM sequence.

[0231] In some embodiments, the editing template extends beyond a nucleotide edit to be incorporated to the target RHO gene sequence. For example, in some embodiments, the editing template comprises at least 1, 2, 3, 4, 5, 6, 7, 8, 9, 10, 11, 12, 13, 14, 15, 16, 17, 18, 19, 20, 21, 22, 23, 24, 25, 26, 27, 28, 29 or 30, 31, 32, 33, 34, 35, 36, 37, 38, 39, 40, 41, 42, 43, 44, 45, 46, 47, 48, 49, 50, 51, 52, 53, 54, 55, 56, 57, 58, 59, 60, 61, 62, 63, 64, 65, 66, 67, 68, 69, 70, 71, 72, 73, 74, 75, 76, 77, 78, 79, or 80 nucleotides.

[0232] In some embodiments, the editing template can comprise a second edit relative to a target sequence. The second edit can be designed to mutate or otherwise silence a PAM sequence such that a corresponding nucleic acid guided nuclease or CRISPR nuclease is no longer able to cleave the target sequence (such edits referred to as “PAM silencing edits).

[0233] Without wishing to be bound by any particular theory, PAM silencing edits may prevent the Cas, e.g., Cas9, nickase, from re-nicking the edit strand before the edit is incorporated in the target strand, therefore improving prime editing efficiency. In some embodiments, a PAM silencing edit is a synonymous edit that does not alter the amino acid sequence encoded by the RHO gene after incorporation of the edit. In some embodiments, a PAM silencing edit is at a position corresponding to a coding region, e.g., an exon, of a RHO gene. In some embodiments, a PAM silencing edit is at a position corresponding to a non-coding region. e.g., an intron, of a RHO gene. In some embodiments, the edits in an intron of a RHO gene is not at a position that corresponds to intron-exon junction and the edit does not affect transcript splicing.

[0234] In some embodiments, the length of the editing template is at least 2, 3, 4, 5, 6, 7, 8, 9, 10, 11, 12, 13, 14, 15, 16, 17, 18, 19, 20, 21, 22, 23, 24, 25, 26, 27, 28, 29, 30, 31, 32, 33, 34, 35, 36, 37, 38, 39, 40, 41, 42, 43, 44, 45, 46, 47, 48, 49, 50, 51, 52, 53, 54, 55, 56, 57, 58, 59, 60, 61, 62, 63, 64, 65, 66, 67, 68, 69, 70, 71, 72, 73, 74, 75, 76, 77, 78, 79, or 80 nucleotides longer than the nick to edit distance. In some embodiments, for example, the nick to edit distance is 8 nucleotides, and the editing template is 10 to 15, 10 to 20, 10 to 25, 10 to 30, 10 to 35, 10 to 40, 10 to 45, 10 to 50, 10 to 55, 10 to 60, 10 to 65, 10 to 70, 10 to 75, or 10 to 80 nucleotides in length. In some embodiments, the nick to edit distance is 22 nucleotides, and the editing template is 24 to 28, 24 to 30, 24 to 32, 24 to 34, 24 to 36, 24 to 37, 24 to 38, 24 to 40, 24 to 45, 24 to 50, 24 to 55, 24 to 60, 24 to 65, 24 to 70, 24 to 75, 24 to 80, 24 to 85, 24 to 90, 24 to 95, 24 to 100, 24 to 105, 24 to 100, 24 to 105, or 24 to 110 nucleotides in length.

[0235] In some embodiments, the editing template comprises an adenine at the first nucleobase position (e.g., for a PEgRNA following 5′-spacer-gRNA core-RTT-PBS-3′ orientation, the 5′ most nucleobase is the “first base”). In some embodiments, the editing template comprises a guanine at the first nucleobase position (e.g., for a PEgRNA following 5′-spacer-gRNA core-RTT-PBS-3′ orientation, the 5′ most nucleobase is the “first base”). In some embodiments, the editing template comprises an uracil at the first nucleobase position (e.g., for a PEgRNA following 5′-spacer-gRNA core-RTT-PBS-3′ orientation, the 5′ most nucleobase is the “first base”). In some embodiments, the editing template comprises a cytosine at the first nucleobase position (e.g., for a PEgRNA following 5′-spacer-gRNA core-RTT-PBS-3′ orientation, the 5′ most nucleobase is the “first base”). In some embodiments, the editing template does not comprise a cytosine at the first nucleobase position (e.g., for a PEgRNA following 5′-spacer-gRNA core-RTT-PBS-3′ orientation, the 5′ most nucleobase is the “first base”).

[0236] The editing template of a PEgRNA may encode a new single stranded DNA (e.g., by reverse transcription) to replace an editing target sequence in the target gene. In some embodiments, the editing target sequence in the edit strand of the target gene is replaced by the newly synthesized strand, and the nucleotide edit(s) are incorporated in the region of the target gene. In some embodiments, the target gene is an RHO gene. In some embodiments, the editing template of the PEgRNA encodes a newly synthesized single stranded DNA that comprises a wild type RHO gene sequence. In some embodiments, the newly synthesized DNA strand replaces the editing target sequence in the target RHO gene, wherein the editing target sequence (or the endogenous sequence complementary to the editing target sequence on the target strand of the RHO gene) comprises a mutation or a nucleotide alteration compared to a wild type RHO gene. In some embodiments, the mutation is associated with retinal degenerative disease, such as retinitis pigmentosa.

[0237] In some embodiments, the newly synthesized single stranded DNA encoded by the editing target sequence replaces the editing target sequence, and corrects the mutation in the editing target sequence of the RHO gene.

[0238] In some embodiments, the editing target sequence comprises a mutation in exon 1 of the RHO gene as compared to a wild type RHO gene. In some embodiments, the editing target sequence comprises a mutation that is located at position 68 of the coding sequence of the rhodopsin protein. In some embodiments, the editing target sequence comprises a c.68C→A mutation (on the sense strand) or a G→T mutation (on the antisense strand) at position 68 of the coding sequence of the rhodopsin protein.

[0239] In some embodiments, the editing template comprises one or more intended nucleotide edits compared to the sequence on the target strand of the RHO gene that is complementary to the editing target sequence. In some embodiments, the editing template encodes a single stranded DNA that comprises one or more intended nucleotide edits compared to the editing target sequence. In some embodiments, the single stranded DNA replaces the editing target sequence by prime editing, thereby incorporating the one or more intended nucleotide edits. In some embodiments, the one or more intended nucleotide edits comprises a A-C substitution at a position corresponding to position 68 of the coding sequence of the rhodopsin protein compared to the editing target sequence. In some embodiments, the one or more intended nucleotide edits comprises a T-G substitution in the anti-sense strand at a position corresponding to position 68 of the coding sequence of the rhodopsin protein compared to the editing target sequence. In some embodiments, incorporation of the one or more intended nucleotide edits corrects the mutation in the editing target sequence to wild type nucleotides at corresponding positions in the RHO gene. As used herein, “correcting” a mutation means restoring a wild type sequence at the place of the mutation in the double stranded target DNA, e.g. target gene, by prime editing. In some embodiments, the editing template comprises and/or encodes a wild type RHO gene sequence.

[0240] In some embodiments, the editing target sequence comprises a mutation that is located between positions 129528639-129535344 GRCh38.p13. In some embodiments, the editing target sequence comprises a mutation that is located between positions 129528701 and 129528901 of human chromosome 13. In some embodiments, the editing target sequence comprises position 129528801 in human chromosome 13.

[0241] In some embodiments, incorporation of the one or more intended nucleotide edits does not correct the mutation in the editing target sequence to wild type sequence, but allows for expression of a functional rhodopsin protein encoded by the RHO gene. For example, in some embodiments, incorporation of the one or more intended nucleotide edits results in one or more codons that are different from a wild type codon but encode one or more amino acids same as the wild type rhodopsin protein. In some embodiments, incorporation of the one or more intended nucleotide edits results in one or more codons that encode one or more amino acids different from the wild type rhodopsin protein, but allows for expression of a functional rhodopsin protein. Exemplary amino acid sequence of wild type rhodopsin protein is provided in SEQ ID NO: 1933. Exemplary mRNA/cDNA sequence of wild type rhodopsin protein is provided in SEQ ID NO: 1934.

Wild-type rhodopsin protein sequence
(SEQ ID NO: 1933)
[sequence omitted]
Wild-type rhodopsin mRNA/cDNA sequence
(SEQ ID NO: 1934)
agagtcatccagctggagccctgagtggctgagctcaggccttcgcagca
ttcttggggggagcagccacgggtcagccacaagggccacagccatgaat
ggcacagaaggccctaacttctacgtgcccttctccaatgcgacgggtgt
ggtacgcagccccttcgagtacccacagtactacctggctgagccatggc
agttctccatgctggccgcctacatgtttctgctgatcgtgctgggcttc
cccatcaacttcctcacgctctacgtcaccgtccagcacaagaagctgcg
cacgcctctcaactacatcctgctcaacctagccgtggctgacctcttca
tggtcctaggtggcttcaccagcaccctctacacctctctgcatggatac
ttcgtcttcgggcccacaggatgcaatttggagggcttctttgccaccct
gggcggtgaaattgccctgtggtccttggtggtcctggccatcgagcggt
acgtggtggtgtgtaagcccatgagcaacttccgcttcggggagaaccat
gccatcatgggcgttgccttcacctgggtcatggcgctggcctgcgccgc
acccccactcgccggctggtccaggtacatccccgagggcctgcagtgct
cgtgtggaatcgactactacacgctcaagccggaggtcaacaacgagtct
tttgtcatctacatgttcgtggtccacttcaccatccccatgattatcat
ctttttctgctatgggcagctcgtcttcaccgtcaaggaggccgctgccc
agcagcaggagtcagccaccacacagaaggcagagaaggaggtcacccgc
atggtcatcatcatggtcatcgctttcctgatctgctgggtgccctacgc
cagcgtggcattctacatcttcacccaccagggctccaacttcggtccca
tcttcatgaccatcccagcgttctttgccaagagcgccgccatctacaac
cctgtcatctatatcatgatgaacaagcagttccggaactgcatgctcac
caccatctgctgcggcaagaacccactgggtgacgatgaggcctctgcta
ccgtgtccaagacggagacgagccaggtggccccggcctaagacctgcct
aggactctgtggccgactataggcgtctcccatcccctacaccttccccc
agccacagccatcccaccaggagcagcgcctgtgcagaatgaacgaagtc
acataggctccttaattttttttttttttttaagaaataattaatgaggc
tcctcactcacctgggacagcctgagaagggacatccaccaagacctact
gatctggagtcccacgttccccaaggccagcgggatgtgtgcccctcctc
ctcccaactcatctttcaggaacacgaggattcttgctttctggaaaagt
gtcccagcttagggataagtgtctagcacagaatggggcacacagtaggt
gcttaataaatgctggatggatgcaggaaggaatggaggaatgaatggga
agggagaacatatctatcctctcagaccctcgcagcagcagcaactcata
cttggctaatgatatggagcagttgtttttccctccctgggcctcacttt
cttctcctataaaatggaaatcccagatccctggtcctgccgacacgcag
ctactgagaagaccaaaagaggtgtgtgtgtgtctatgtgtgtgtttcag
cactttgtaaatagcaagaagctgtacagattctagttaatgttgtgaat
aacatcaattaatgtaactagttaattactatgattatcacctcctgata
gtgaacattttgagattgggcattcagatgatggggtttcacccaacctt
ggggcaggtttttaaaaattagctaggcatcaaggccagaccagggctgg
gggttgggctgtaggcagggacagtcacaggaatgcagaatgcagtcatc
agacctgaaaaaacaacactgggggagggggacggtgaaggccaagttcc
caatgagggtgagattgggcctggggtctcacccctagtgtggggcccca
ggtcccgtgcctccccttcccaatgtggcctatggagagacaggcctttc
tctcagcctctggaagccacctgctcttttgctctagcacctgggtccca
gcatctagagcatggagcctctagaagccatgctcacccgcccacattta
attaacagctgagtccctgatgtcatccttatctcgaagagcttagaaac
aaagagtgggaaattccactgggcctaccttccttggggatgttcatggg
ccccagtttccagtttcccttgccagacaagcccatcttcagcagttgct
agtccattctccattctggagaatctgctccaaaaagctggccacatctc
tgaggtgtcagaattaagctgcctcagtaactgctcccccttctccatat
aagcaaagccagaagctctagctttacccagctctgcctggagactaagg
caaattgggccattaaaagctcagctcctatgttggtattaacggtggtg
ggttttgttgctttcacactctatccacaggatagattgaaactgccagc
ttccacctgatccctgaccctgggatggctggattgagcaatgagcagag
ccaagcagcacagagtcccctggggctagaggtggaggaggcagtcctgg
gaatgggaaaaacccca

[0242] A guide RNA core (also referred to herein as the gRNA core, gRNA scaffold, or gRNA backbone sequence) of a PEgRNA may contain a polynucleotide sequence that binds to a DNA binding domain (e.g., Cas9) of a prime editor. The gRNA core may interact with a prime editor as described herein, for example, by association with a DNA binding domain, such as a DNA nickase of the prime editor.

[0243] One of skill in the art will recognize that different prime editors having different DNA binding domains from different DNA binding proteins may require different gRNA core sequences specific to the DNA binding protein. In some embodiments, the gRNA core is capable of binding to a Cas9-based prime editor. In some embodiments, the gRNA core is capable of binding to a Cpf1-based prime editor. In some embodiments, the gRNA core is capable of binding to a Cas12b-based prime editor.

[0244] In some embodiments, the gRNA core comprises regions and secondary structures involved in binding with specific CRISPR Cas proteins. For example, in a Cas9 based prime editing system, the gRNA core of a PEgRNA may comprise one or more regions of a base paired “lower stem” adjacent to the spacer sequence and a base paired “upper stem” following the lower stem, where the lower stem and upper stem may be connected by a “bulge” comprising unpaired RNAs. The gRNA core may further comprise a “nexus” distal from the spacer sequence, followed by a hairpin structure, e.g., at the 3′ end, as exemplified in FIG. 3. In some embodiments, the gRNA core comprises modified nucleotides as compared to a wild type gRNA core in the lower stem, upper stem, and/or the hairpin. For example, nucleotides in the lower stem, upper stem, an/or the hairpin regions may be modified, deleted, or replaced. In some embodiments, RNA nucleotides in the lower stem, upper stem, an/or the hairpin regions may be replaced with one or more DNA sequences. In some embodiments, the gRNA core comprises unmodified or wild type RNA sequences in the nexus and/or the bulge regions. In some embodiments, the gRNA core does not include long stretches of A-T pairs, for example, a GUUUU-AAAAC pairing element. In some embodiments, a prime editing system comprises a prime editor and a PEgRNA, wherein the prime editor comprises a SpCas9 nickase variant thereof, and the gRNA core of the PEgRNA comprises the sequence: GUUUUAGAGCIAGAAAUAGCAAGUiUAAAAUAAGGCUAGUCCGUUAUCAACUIUGAAAA AGUGGCACCGAGUCGGUGC (SEQ ID NO: 1854); GUUUGAGAGCUAGAAAUAGCAAGUUUAAUAAGGCUAGUCCGUUAUCAACUUGAAAA AGUGGGACCGAGUCGGUCC (SEQ ID NO: 1935), or GUUUAAGAGCUAUIGCUGGAAACAGCAUAGCAAGUUUAAAUAAGGCUIAGUCCGUUAIUC AACUUGAAAAAGUGGCACCGAGUCGGUGC (SEQ ID NO: 1858). In some embodiments, the gRNA core comprises the sequence GUUIUUAGAGCUAGAAAUACCAAGUUAAAAUAAGGCUACCCGUUIAUCAACUUGAAAA AGUGGCACCGAGUCGGUGC (SEQ ID NO: 1854). Any gRNA core sequences known in the art are also contemplated in the prime editing compositions described herein.

[0245] In some embodiments, the PEgRNA and/or ngRNA comprises a gRNA core that comprises a nucleic acid sequence selected from the Table 14 below. In some embodiments, the PEgRNA and/or ngRNA comprises a gRNA core that comprises a nucleic acid sequence that has at least about 50%, 55%, 60%, 65%, 70%, 75%, 80%, 85%, 90%, 95%, 96%, 97%, 98%, or 99% sequence identity to any one of SEQ ID NOs: 1854-1859, or 1935. In some embodiments, the PEgRNA and/or ngRNA comprises a gRNA core that comprises a nucleic acid sequence selected from the group consisting of SEQ ID NOs: 1854-1859, or 1935.

TABLE 14
lists exemplary nucleic acid sequences of gRNA
core (gRNA scaffold). The sequences in Table 14
below are annotated with SEQ ID NO as required by
ST.26 standard. Although all the sequences
provided in Table 14 are RNA sequences, “T” is
used instead of a “U” in the sequences for
consistency with the ST.26 standard.

| SEQ | |
|---|---|
| ID | Nucleic acid sequence of gRNA core or |
| NO: | scaffold |
| 1854 | GTTTTAGAGCTAGAAATAGCAAGTTAAAATAAGGCTAGTCC |
| | GTTATCAACTTGAAAAAGTGGCACCGAGTCGGTGC |
| 1855 | GTTTAAGAGCTAGAAATAGCAAGTTTAAATAAGGCTAGTCC |
| | GTTATCAACTTGAAAAAGTGGCACCGAGTCGGTGC |
| 1856 | GTTTAAGAGCTAGAAATAGCAAGTTTAAATAAGGCTAGTCC |
| | GTTATCAGCGTGAAAACGCGGCACCGAGTCGGTGC |
| 1857 | GTTTAAGAGCGGGGAAATCCGCAAGTTTAAATAAGGCTAGT |
| | CCGTTATCAGCGTGAAAACGCGGCACCGAGTCGGTGC |
| 1858 | GTTTAAGAGCTATGCTGGAAACAGCATAGCAAGTTTAAATA |
| | AGGCTAGTCCGTTATCAACTTGAAAAAGTGGCACCGAGTCG |
| | GTGC |
| 1859 | GTTTAAGAGCTATGCTGGAAACAGCATAGCAAGTTTAAATA |
| | AGGCTAGTCCGTTATCAGCGTGAAAACGCGGCACCGAGTCG |
| | GTGC |

[0246] In some embodiments, the PEgRNA and/or ngRNA comprises a nucleic acid sequence selected from the Table 15 below at the 3′ end. In some embodiments, the PEgRNA and/or ngRNA comprises a nucleic acid sequence that has at least about 50%, 55%, 60%, 65%, 70%, 75%, 80%, 85%, 90%, 95%, 96%, 97%, 98%, or 99% sequence identity to any one of SEQ ID NOs: 1850-1853 at the 3′ end. In some embodiments, the PEgRNA and/or ngRNA comprises a nucleic acid sequence selected from the group consisting of SEQ ID NOs: 1850-1853.

TABLE 15
lists exemplary nucleic acid sequences of 3′ motif
(e.g., Univ. 3′ motif) of PEgRNA or ngRNA. The
sequences in Table 15 below are annotated with SEQ
ID NO as required by ST.26 standard. Although all
the sequences provided in Table 15 are RNA
sequences, “T” is used instead of a “U” in the
sequences for consistency with the ST.26 standard.

| SEQ | |
|---|---|
| ID | |
| NO: | Nucleic acid sequence of 3′ motif |
| 1850 | CGCGTCTCTACGTGGGGGCGCG |
| 1851 | CGGGTCTCTACGTGGGGGCCCG |
| 1852 | GCGGCACCGTCCGCCCAAACGG |
| 1853 | CGCGGTTCTATCTAGTTACGCGTTAAACCAACTAGAA |

[0247] In some embodiments, the PEgRNA comprises a nucleic acid sequence selected from the Table 16 below at the 3′ end. In some embodiments, the PEgRNA comprises a nucleic acid sequence that has at least about 50%, 55%, 60%, 65%, 70%, 75%, 80%, 85%, 90%, 95%, 96%, 97%, 98%, or 99% sequence identity to any one of sequence number 1774-1849 at the 3′ end. In some embodiments, the PEgRNA comprises a nucleic acid sequence selected from the group consisting of sequence number 1774-1849.

TABLE 16
lists exemplary nucleic acid sequences of 3′ motif
(e.g., Seq. Spec. 3′ motif) of PEgRNA. The
sequences in Table 16 below are annotated with a
sequence number as required by ST.26 standard.
Although all the sequences provided in Table 16
are RNA sequences, “T” is used instead of a “U” in
the sequences for consistency with the ST.26
standard.

| Sequence | Nucleic acid |
|---|---|
| number | sequence of 3′ motif |
| 1774 | GGCTGC |
| 1775 | GGGCTG |
| 1776 | GGGGCT |
| 1777 | AGGGGC |
| 1778 | AAGGGG |
| 1779 | GAAGGG |
| 1780 | CGAAGG |
| 1781 | TCGAAG |
| 1782 | CTCGAA |
| 1783 | ACTCGA |
| 1784 | TACTCG |
| 1785 | GTACTC |
| 1786 | GGTACT |
| 1787 | GGGTAC |
| 1788 | TGGGTA |
| 1789 | GTGGGT |
| 1790 | TGTGGG |
| 1791 | ATACTC |
| 1792 | GATACT |
| 1793 | GGATAC |
| 1794 | TGGATA |
| 1795 | GTGGAT |
| 1796 | TGTGGA |
| 1797 | GGGGCTGC |
| 1798 | AGGGGCTG |
| 1799 | AAGGGGCT |
| 1800 | GAAGGGGC |
| 1801 | CGAAGGGG |
| 1802 | TCGAAGGG |
| 1803 | CTCGAAGG |
| 1804 | ACTCGAAG |
| 1805 | TACTCGAA |
| 1806 | GTACTCGA |
| 1807 | GGTACTCG |
| 1808 | GGGTACTC |
| 1809 | TGGGTACT |
| 1810 | GTGGGTAC |
| 1811 | TGTGGGTA |
| 1812 | ATACTCGA |
| 1813 | GATACTCG |
| 1814 | GGATACTC |
| 1815 | TGGATACT |
| 1816 | GTGGATAC |
| 1817 | TGTGGATA |
| 1818 | CTTCGA |
| 1819 | CCTTCG |
| 1820 | CCCTTC |
| 1821 | CCCCTT |
| 1822 | GCCCCT |
| 1823 | AGCCCC |
| 1824 | CAGCCC |
| 1825 | GCAGCC |
| 1826 | CGCAGC |
| 1827 | ACGCAG |
| 1828 | TACGCA |
| 1829 | GTACGC |
| 1830 | CGTACG |
| 1831 | TCGTAC |
| 1832 | GTCGTA |
| 1833 | TGTCGT |
| 1834 | GTGTCG |
| 1835 | CCCTTCGA |
| 1836 | CCCCTTCG |
| 1837 | GCCCCTTC |
| 1838 | AGCCCCTT |
| 1839 | CAGCCCCT |
| 1840 | GCAGCCCC |
| 1841 | CGCAGCCC |
| 1842 | ACGCAGCC |
| 1843 | TACGCAGC |
| 1844 | GTACGCAG |
| 1845 | CGTACGCA |
| 1846 | TCGTACGC |
| 1847 | GTCGTACG |
| 1848 | TGTCGTAC |
| 1849 | GTGTCGTA |

[0248] In some embodiments, a PEgRNA comprises a linker. In some embodiments, the secondary structure or a 3′ motif is linked to one or more other component of a PEgRNA via a linker. For example, in some embodiments, the secondary structure is at the 3′ end of the PEgRNA (e.g., a RTT, or a PBS) and is linked to the 3′ end of a PBS via a linker. For example, in some embodiments, a 3′ motif is at the 3′ end of the PEgRNA and is linked to the 3′ end of a PEgRNA (e.g., a RTT or a PBS) via a linker. In some embodiments, the secondary structure or a 5′ motif is at the 5′ end of the PEgRNA and is linked to the 5′ end of a spacer via a linker. In some embodiments, the linker is a nucleotide linker that is 1, 2, 3, 4, 5, 6, 7, 8, 9, 10, 11, 12, 13, 14, 15, 16, 17, 18, 19, 20, 21, 22, 23, 24, 25, 26, 27, 28, 29, 30, 31, 32, 33, 34, 35, 36, 37, 38, 39, 40, 41, 42, 43, 44, 45, 46, 47, 48, 49, or 50 nucleotides in length. In some embodiments, the linker is 5 to 10 nucleotides in length. In some embodiments, the linker is 10 to 20 nucleotides in length. In some embodiments, the linker is 15 to 25 nucleotides in length. In some embodiments, the linker is 8 nucleotides in length.

[0249] In some embodiments, the linker is designed to minimize base pairing between the linker and another component of the PEgRNA. In some embodiments, the linker is designed to minimize base pairing between the linker and the spacer. In some embodiments, the linker is designed to minimize base pairing between the linker and the PBS. In some embodiments, the linker is designed to minimize base pairing between the linker and the editing template. In some embodiments, the linker is designed to minimize base pairing between the linker and the sequence of the RNA secondary structure. In some embodiments, the linker is optimized to minimize base pairing between the linker and another component of the PEgRNA, in order of the following priority: spacer, PBS, editing template and then scaffold. In some embodiments, base paring probability is calculated using ViennaRNA 2.0, as described in Lorenz, R. et al. ViennaRNA package 2.0. Algorithms Mol. Biol. 6, incorporated by reference in its entirety herein, under standard parameters (37° C., 1 M NaCl, 0.05 M MgCl2).

[0250] In some embodiments, the PEgRNA comprises a linker that comprises nucleic acid sequence selected from the Table 17 below. In some embodiments, the PEgRNA comprises a linker that comprises a nucleic acid sequence that has at least about 50%, 55%, 60%, 65%, 70%, 75%, 80%, 85%, 90%, 95%, 96%, 97%, 98%, or 99% sequence identity to any one of sequence number 1647-1773. In some embodiments, the PEgRNA comprises a linker that comprises a nucleic acid sequence selected from the group consisting of sequence number 1647-1773.

TABLE 17
lists exemplary nucleic acid sequences of linkers
of PEgRNA. The sequences in Table 17 below are
annotated with a sequence number as required by
ST.26 standard. Although all the sequences
provided in Table 17 are RNA sequences, “T” is
used instead of a “U” in the sequences for
consistency with the ST.26 standard.

| Sequence number | Nucleic acid sequence of linker |
|---|---|
| 1647 | ATTCGT |
| 1648 | AATACA |
| 1649 | ATAGTG |
| 1650 | AGAAAG |
| 1651 | AATAAA |
| 1652 | AATAAT |
| 1653 | ATTCAA |
| 1654 | ACCTTG |
| 1655 | ACCTCT |
| 1656 | AACTAG |
| 1657 | AAGTCG |
| 1658 | AAGTCC |
| 1659 | ATAGAT |
| 1660 | AAAAAC |
| 1661 | AAAAAA |
| 1662 | ATCATG |
| 1663 | AACACT |
| 1664 | TCACAA |
| 1665 | TCATAG |
| 1666 | TCAAAA |
| 1667 | CCAAAT |
| 1668 | CCCCTG |
| 1669 | CTATTC |
| 1670 | ACTCCC |
| 1671 | TACTTC |
| 1672 | CTTGAT |
| 1673 | CTTCTT |
| 1674 | CACCTC |
| 1675 | CACCCC |
| 1676 | TTCTAT |
| 1677 | CAATTC |
| 1678 | AAGAAA |
| 1679 | AAGAAT |
| 1680 | AAATTG |
| 1681 | ATCCCA |
| 1682 | ATCCCC |
| 1683 | ACCTCC |
| 1684 | ATAGAC |
| 1685 | AAGTTC |
| 1686 | AGAAAC |
| 1687 | AAAGAA |
| 1688 | AAATAA |
| 1689 | TCAAGT |
| 1690 | AAAATT |
| 1691 | ACTACT |
| 1692 | ACTATA |
| 1693 | ACACTG |
| 1694 | ATACTC |
| 1695 | TCTCCA |
| 1696 | AATATT |
| 1697 | CAAATC |
| 1698 | AAAATA |
| 1699 | AATAAC |
| 1700 | ATTAAC |
| 1701 | CTGTTA |
| 1702 | CAAAAT |
| 1703 | CCCCCC |
| 1704 | AACCGA |
| 1705 | ACCCCG |
| 1706 | CAAAAG |
| 1707 | AAAACG |
| 1708 | AACCCT |
| 1709 | AAAAAT |
| 1710 | ATAAAA |
| 1711 | ATCATC |
| 1712 | ATCTAT |
| 1713 | ACACTT |
| 1714 | ACTCGG |
| 1715 | CCCAAG |
| 1716 | AAAAAG |
| 1717 | ATCATT |
| 1718 | CAACAC |
| 1719 | ACACCC |
| 1720 | ACCCGG |
| 1721 | ACTACA |
| 1722 | ATTATC |
| 1723 | AACCCG |
| 1724 | ATAAAT |
| 1725 | ATGACA |
| 1726 | TTATAA |
| 1727 | ATAATA |
| 1728 | AACATTGA |
| 1729 | AATTAT |
| 1730 | ACATTC |
| 1731 | AGATTC |
| 1732 | TCCTAC |
| 1733 | ACTTAC |
| 1734 | TTCAAT |
| 1735 | TCTTCT |
| 1736 | ATTCTT |
| 1737 | TCATTT |
| 1738 | TATCTT |
| 1739 | AGTATC |
| 1740 | CCTCTC |
| 1741 | CCTCAT |
| 1742 | AAAATC |
| 1743 | AAACAT |
| 1744 | TTCATC |
| 1745 | ATATCC |
| 1746 | TTGGTA |
| 1747 | TTGTGG |
| 1748 | TCACTC |
| 1749 | TTCTTG |
| 1750 | TCTATT |
| 1751 | TTAAAA |
| 1752 | TAAAAA |
| 1753 | CCTATC |
| 1754 | CACAAT |
| 1755 | TAACAC |
| 1756 | TATCCT |
| 1757 | TATCCA |
| 1758 | TATGCG |
| 1759 | TATCAG |
| 1760 | TATATA |
| 1761 | TACACT |
| 1762 | CAAATT |
| 1763 | CCCCCA |
| 1764 | TCTCCC |
| 1765 | TTCTCC |
| 1766 | TCACCA |
| 1767 | TCAGCA |
| 1768 | TACCAT |
| 1769 | TATTCT |
| 1770 | TTAATC |
| 1771 | TTATCT |
| 1772 | CCAGCT |
| 1773 | CCTGCC |

[0251] A PEgRNA may also comprise optional modifiers, e.g., 3′ end modifier region and/or an 5′ end modifier region. In some embodiments, a PEgRNA comprises at least one nucleotide that is not part of a spacer, a gRNA core, or an extension arm. The optional sequence modifiers could be positioned within or between any of the other regions shown, and not limited to being located at the 3′ and 5′ ends. In certain embodiments, the PEgRNA comprises secondary RNA structure, such as, but not limited to, aptamers, hairpins, stem/loops, toe loops, and/or RNA-binding protein recruitment domains (e.g., the MS2 aptamer which recruits and binds to the MS2cp protein). In some embodiments, a PEgRNA comprises a short stretch of uracil at the 5′ end or the 3′ end. For example, in some embodiments, a PEgRNA comprising a 3′ extension arm comprises a “UUU” sequence at the 3′ end of the extension arm. In some embodiments, a PEgRNA comprises a toe loop sequence at the 3′ end. In some embodiments, the PEgRNA comprises a 3′ extension arm and a toe loop sequence at the 3′ end of the extension arm. In some embodiments, the PEgRNA comprises a 5′ extension arm and a toe loop sequence at the 5′ end of the extension arm. In some embodiments, the PEgRNA comprises a toe loop element having the sequence 5′-GAAANNNNN-3′, wherein N is any nucleobase. In some embodiments, the secondary RNA structure is positioned within the spacer. In some embodiments, the secondary structure is positioned within the extension arm. In some embodiments, the secondary structure is positioned within the gRNA core. In some embodiments, the secondary structure is positioned between the spacer and the gRNA core, between the gRNA core and the extension arm, or between the spacer and the extension arm. In some embodiments, the secondary structure is positioned between the PBS and the editing template. In some embodiments the secondary structure is positioned at the 3′ end or at the 5′ end of the PEgRNA. In some embodiments, the PEgRNA comprises a transcriptional termination signal at the 3′ end of the PEgRNA. In addition to secondary RNA structures, the PEgRNA may comprise a chemical linker or a poly(N) linker or tail, where “N” can be any nucleobase. In some embodiments, the chemical linker may function to prevent reverse transcription of the gRNA core.

[0252] In some embodiments, a prime editing system or composition further comprises a nick guide polynucleotide, such as a nick guide RNA (ngRNA). In some embodiments, a ngRNA comprises a spacer (referred to as a ngRNA spacer or ng spacer) and a gRNA core, wherein the spacer of the ngRNA comprises a region of complementarity to the edit strand, and wherein the gRNA core can interact with a Cas, e.g., Cas9, of a prime editor. Without wishing to be bound by any particular theory, an ngRNA may bind to the edit strand and direct the Cas nickase to generate a nick on the non-edit strand (or target strand). In some embodiments, the nick on the non-edit strand directs endogenous DNA repair machinery to use the edit strand as a template for repair of the non-edit strand, which may increase efficiency of prime editing. In some embodiments, the non-edit strand is nicked by a prime editor localized to the non-edit strand by the ngRNA. Accordingly, also provided herein are PEgRNA systems comprising at least one PEgRNA and at least one ngRNA.

[0253] A prime editing system comprising a PEgRNA (or one or more polynucleotide encoding the PEgRNA) and a prime editor protein (or one or more polynucleotides encoding the prime editor), may be referred to as a PE2 prime editing system and the corresponding editing approach referred to as PE2 approach or PE2 strategy. A PE2 system does not contain a ngRNA. A prime editing system comprising a PEgRNA (or one or more polynucleotide encoding the PEgRNA), a prime editor protein (or one or more polynucleotides encoding the prime editor), and a ngRNA (or one or more polynucleotides encoding the ngRNA) may be referred to as a “PE3” prime editing system. In some embodiments, an ngRNA spacer sequence is complementary to a portion of the edit strand that includes the intended nucleotide edit, and may hybridize with the edit strand only after the edit has been incorporated on the edit strand. Such ngRNA may be referred to a “PE3b” ngRNA, and the prime editing system a PE3b prime editing system.

[0254] In some embodiments, a PEgRNA or a nick guide RNA (ngRNA) can be chemically synthesized, or can be assembled or cloned and transcribed from a DNA sequence, e.g., a plasmid DNA sequence, or by any RNA oligonucleotide synthesis method known in the art. In some embodiments, DNA sequence that encodes a PEgRNA (or ngRNA) may be designed to append one or more nucleotides at the 5′ end or the 3′ end of the PEgRNA (or nick guide RNA) encoding sequence to enhance PEgRNA transcription. For example, in some embodiments, a DNA sequence that encodes a PEgRNA (or nick guide RNA) (or an ngRNA) may be designed to append a nucleotide G at the 5′ end. Accordingly, in some embodiments, the PEgRNA (or nick guide RNA) may comprise an appended nucleotide G at the 5′ end. In some embodiments, a DNA sequence that encodes a PEgRNA (or nick guide RNA) may be designed to append a sequence that enhances transcription, e.g., a Kozak sequence, at the 5′ end. In some embodiments, a DNA sequence that encodes a PEgRNA (or nick guide RNA) may be designed to append the sequence CACC or CCACC at the 5′ end. Accordingly, in some embodiments, the PEgRNA (or nick guide RNA) may comprise an appended sequence CACC or CCACC at the 5′ end. In some embodiments, a DNA sequence that encodes a PEgRNA (or nick guide RNA) may be designed to append the sequence TTT, TTTT, TTTTT TTTTTT, TTTTTTTT at the 3′ end. Accordingly, in some embodiments, the PEgRNA (or nick guide RNA) may comprise an appended sequence UUU, UUUU, UUUUU, UUUUUU, or UUUUUUU at the 3′ end. In some embodiments, a PEgRNA or ngRNA may include a modifying sequence at the 3′ end having the sequence AACAUUGACGCGUCUCUACGUGGGGGCGCG (SEQ ID NO: 1936). In some embodiments, a PEgRNA or a ngRNA comprises the sequence TTTT (sequence number 1860) at the 3′ end. In some embodiments, a PEgRNA or a ngRNA comprises the sequence TTTTTTT (sequence number 1861) at the 3′ end. In some embodiments, a PEgRNA or a ngRNA comprises a 3′ terminator sequence (e.g., TTTT; sequence number 1860) at the 3′ end. In some embodiments, a PEgRNA or a ngRNA comprises a transcription adaptation sequence (e.g., TTTTTTT sequence number 1861) at the 3′ end. The sequences in sequence number 1860, and sequence number 1861 are annotated with a sequence number as required by ST.26 standard. Although the sequences set forth in sequence number 1860, and sequence number 1861 are RNA sequences, “T” is used instead of a “U” in the sequences for consistency with the ST.26 standard.

[0255] In some embodiments, the ng search target sequence is located on the non-target strand, within 10 base pairs to 100 base pairs of an intended nucleotide edit incorporated by the PEgRNA on the edit strand. In some embodiments, the ng target search target sequence is within 10 bp, 20 bp, 30 bp, 40 bp, 50 bp, 60 bp, 70 bp, 80 bp, 90 bp, 91 bp, 92 bp, 93 bp, 94 bp, 95 bp, 96 bp, 97 bp, 98 bp, 99 bp, or 100 bp of an intended nucleotide edit incorporated by the PEgRNA on the edit strand. In some embodiments, the 5′ ends of the ng search target sequence and the PEgRNA search target sequence are within 1, 2, 3, 4, 5, 6, 7, 8, 9, or 10 bp apart from each other. In some embodiments, the 5′ ends of the ng search target sequence and the PEgRNA search target sequence are within 10 bp, 20 bp, 30 bp, 40 bp, 50 bp, 60 bp, 70 bp, 80 bp, 90 bp, 91 bp, 92 bp, 93 bp, 94 bp, 95 bp, 96 bp, 97 bp, 98 bp, 99 bp, or 100 bp apart from each other.

[0256] In some embodiments, an ng spacer sequence is complementary to, and may hybridize with the second search target sequence only after an intended nucleotide edit has been incorporated on the edit strand, by the editing template of a PEgRNA. In some embodiments, such a prime editing system may be referred to as a “PE3b” prime editing system or composition. In some embodiments, the ngRNA comprises a spacer sequence that matches only the edit strand after incorporation of the nucleotide edits, but not the endogenous target gene sequence on the edit strand. Accordingly, in some embodiments, an intended nucleotide edit is incorporated within the ng search target sequence.

TABLE 1

| Sequence | | |
|---|---|---|
| Number | Sequence | Description |
| 1 | CAGCCAGGTAGTACTGT (SEQ ID NO: 1) | PEgRNA spacer (GGG PAM) |
| 2 | TCAGCCAGGTAGTACTGT (SEQ ID NO: 2) | PEgRNA spacer (GGG PAM) |
| 3 | CTCAGCCAGGTAGTACTGT (SEQ ID NO: | PEgRNA spacer (GGG PAM) |
| | 3) | |
| 4 | GCTCAGCCAGGTAGTACTGT (SEQ ID | PEgRNA spacer (GGG PAM) |
| | NO: 4) | |
| 5 | GGCTCAGCCAGGTAGTACTGT (SEQ ID | PEgRNA spacer (GGG PAM) |
| | NO: 5) | |
| 6 | TGGCTCAGCCAGGTAGTACTGT (SEQ ID | PEgRNA spacer (GGG PAM) |
| | NO: 6) | |
| 7 | GTACT | PBS |
| 8 | GTACTA | PBS |
| 9 | GTACTAC | PBS |
| 10 | GTACTACC | PBS |
| 11 | GTACTACCT | PBS |
| 12 | GTACTACCTG (SEQ ID NO: 12) | PBS |
| 13 | GTACTACCTGG (SEQ ID NO: 13) | PBS |
| 14 | GTACTACCTGGC (SEQ ID NO: 14) | PBS |
| 15 | GTACTACCTGGCT (SEQ ID NO: 15) | PBS |
| 16 | GTACTACCTGGCTG (SEQ ID NO: 16) | PBS |
| 17 | GTACTACCTGGCTGA (SEQ ID NO: 17) | PBS |
| 18 | GTACTACCTGGCTGAG (SEQ ID NO: 18) | PBS |
| 19 | GTACTACCTGGCTGAGC (SEQ ID NO: 19) | PBS |
| 20 | GTACTACCTGGCTGAGCC (SEQ ID NO: | PBS |
| | 20) | |
| 21 | GTACTACCTGGCTGAGCCA (SEQ ID NO: | PBS |
| | 21) | |
| 22 | CCTTCGAGTACCCACA (SEQ ID NO: 22) | RTT |
| 23 | CCTTCGAGTATCCACA (SEQ ID NO: 23) | RTT*1 (GGG-to-GGA PAM silencing |
| | | edit) |
| 24 | CCCTTCGAGTACCCACA (SEQ ID NO: 24) | RTT |
| 25 | CCCTTCGAGTATCCACA (SEQ ID NO: 25) | RTT*1 (GGG-to-GGA PAM silencing |
| | | edit) |
| 26 | CCCCTTCGAGTACCCACA (SEQ ID NO: | RTT |
| | 26) | |
| 27 | CCCCTTCGAGTATCCACA (SEQ ID NO: | RTT*1 (GGG-to-GGA PAM silencing |
| | 27) | edit) |
| 28 | GCCCCTTCGAGTACCCACA (SEQ ID NO: | RTT |
| | 28) | |
| 29 | GCCCCTTCGAGTATCCACA (SEQ ID NO: | RTT*1 (GGG-to-GGA PAM silencing |
| | 29) | edit) |
| 30 | AGCCCCTTCGAGTACCCACA (SEQ ID | RTT |
| | NO: 30) | |
| 31 | AGCCCCTTCGAGTATCCACA (SEQ ID | RTT*1 (GGG-to-GGA PAM silencing |
| | NO: 31) | edit) |
| 32 | CAGCCCCTTCGAGTACCCACA (SEQ ID | RTT |
| | NO: 32) | |
| 33 | CAGCCCCTTCGAGTATCCACA (SEQ ID | RTT*1 (GGG-to-GGA PAM silencing |
| | NO: 33) | edit) |
| 34 | GCAGCCCCTTCGAGTACCCACA (SEQ ID | RTT |
| | NO: 34) | |
| 35 | GCAGCCCCTTCGAGTATCCACA (SEQ ID | RTT*1 (GGG-to-GGA PAM silencing |
| | NO: 35) | edit) |
| 36 | CGCAGCCCCTTCGAGTACCCACA (SEQ | RTT |
| | ID NO: 36) | |
| 37 | CGCAGCCCCTTCGAGTATCCACA (SEQ | RTT*1 (GGG-to-GGA PAM silencing |
| | ID NO: 37) | edit) |
| 38 | ACGCAGCCCCTTCGAGTACCCACA (SEQ | RTT |
| | ID NO: 38) | |
| 39 | ACGCAGCCCCTTCGAGTATCCACA (SEQ | RTT*1 (GGG-to-GGA PAM silencing |
| | ID NO: 39) | edit) |
| 40 | TACGCAGCCCCTTCGAGTACCCACA | RTT |
| | (SEQ ID NO: 40) | |
| 41 | TACGCAGCCCCTTCGAGTATCCACA | RTT*1 (GGG-to-GGA PAM silencing |
| | (SEQ ID NO: 41) | edit) |
| 42 | GTACGCAGCCCCTTCGAGTACCCACA | RTT |
| | (SEQ ID NO: 42) | |
| 43 | GTACGCAGCCCCTTCGAGTATCCACA | RTT*1 (GGG-to-GGA PAM silencing |
| | (SEQ ID NO: 43) | edit) |
| 44 | GGTACGCAGCCCCTTCGAGTACCCACA | RTT |
| | (SEQ ID NO: 44) | |
| 45 | GGTACGCAGCCCCTTCGAGTATCCACA | RTT*1 (GGG-to-GGA PAM silencing |
| | (SEQ ID NO: 45) | edit) |
| 46 | TGGTACGCAGCCCCTTCGAGTACCCACA | RTT |
| | (SEQ ID NO: 46) | |
| 47 | TGGTACGCAGCCCCTTCGAGTATCCACA | RTT*1 (GGG-to-GGA PAM silencing |
| | (SEQ ID NO: 47) | edit) |
| 48 | GTGGTACGCAGCCCCTTCGAGTACCCAC | RTT |
| | A (SEQ ID NO: 48) | |
| 49 | GTGGTACGCAGCCCCTTCGAGTATCCAC | RTT*1 (GGG-to-GGA PAM silencing |
| | A (SEQ ID NO: 49) | edit) |
| 50 | TGTGGTACGCAGCCCCTTCGAGTACCCA | RTT |
| | CA (SEQ ID NO: 50) | |
| 51 | TGTGGTACGCAGCCCCTTCGAGTATCCA | RTT*1 (GGG-to-GGA PAM silencing |
| | CA (SEQ ID NO: 51) | edit) |
| 52 | GTGTGGTACGCAGCCCCTTCGAGTACCC | RTT |
| | ACA (SEQ ID NO: 52) | |
| 53 | GTGTGGTACGCAGCCCCTTCGAGTATCC | RTT*1 (GGG-to-GGA PAM silencing |
| | ACA (SEQ ID NO: 53) | edit) |
| 54 | GGTGTGGTACGCAGCCCCTTCGAGTACC | RTT |
| | CACA (SEQ ID NO: 54) | |
| 55 | GGTGTGGTACGCAGCCCCTTCGAGTATC | RTT*1 (GGG-to-GGA PAM silencing |
| | CACA (SEQ ID NO: 55) | edit) |
| 56 | GGGTGTGGTACGCAGCCCCTTCGAGTA | RTT |
| | CCCACA (SEQ ID NO: 56) | |
| 57 | GGGTGTGGTACGCAGCCCCTTCGAGTAT | RTT*1 (GGG-to-GGA PAM silencing |
| | CCACA (SEQ ID NO: 57) | edit) |
| 58 | CGGGTGTGGTACGCAGCCCCTTCGAGT | RTT |
| | ACCCACA (SEQ ID NO: 58) | |
| 59 | CGGGTGTGGTACGCAGCCCCTTCGAGT | RTT*1 (GGG-to-GGA PAM silencing |
| | ATCCACA (SEQ ID NO: 59) | edit) |
| 60 | ACGGGTGTGGTACGCAGCCCCTTCGAG | RTT |
| | TACCCACA (SEQ ID NO: 60) | |
| 61 | ACGGGTGTGGTACGCAGCCCCTTCGAG | RTT*1 (GGG-to-GGA PAM silencing |
| | TATCCACA (SEQ ID NO: 61) | edit) |
| 62 | GACGGGTGTGGTACGCAGCCCCTTCGA | RTT |
| | GTACCCACA (SEQ ID NO: 62) | |
| 63 | GACGGGTGTGGTACGCAGCCCCTTCGA | RTT*1 (GGG-to-GGA PAM silencing |
| | GTATCCACA (SEQ ID NO: 63) | edit) |
| 64 | CGACGGGTGTGGTACGCAGCCCCTTCG | RTT |
| | AGTACCCACA (SEQ ID NO: 64) | |
| 65 | CGACGGGTGTGGTACGCAGCCCCTTCG | RTT*1 (GGG-to-GGA PAM silencing |
| | AGTATCCACA (SEQ ID NO: 65) | edit) |
| 66 | GCGACGGGTGTGGTACGCAGCCCCTTC | RTT |
| | GAGTACCCACA (SEQ ID NO: 66) | |
| 67 | GCGACGGGTGTGGTACGCAGCCCCTTC | RTT*1 (GGG-to-GGA PAM silencing |
| | GAGTATCCACA (SEQ ID NO: 67) | edit) |
| 68 | TGCGACGGGTGTGGTACGCAGCCCCTTC | RTT |
| | GAGTACCCACA (SEQ ID NO: 68) | |
| 69 | TGCGACGGGTGTGGTACGCAGCCCCTTC | RTT*1 (GGG-to-GGA PAM silencing |
| | GAGTATCCACA (SEQ ID NO: 69) | edit) |
| 70 | ATGCGACGGGTGTGGTACGCAGCCCCT | RTT |
| | TCGAGTACCCACA (SEQ ID NO: 70) | |
| 71 | ATGCGACGGGTGTGGTACGCAGCCCCT | RTT*1 (GGG-to-GGA PAM silencing |
| | TCGAGTATCCACA (SEQ ID NO: 71) | edit) |
| 72 | ACAAGGGCCACAGCCATGAA (SEQ ID | PE3 ngRNA spacer (TGG PAM) |
| | NO: 72) | |
| 73 | ACAGCCATGAATGGCACAGA (SEQ ID | PE3 ngRNA spacer (AGG PAM) |
| | NO: 73) | |
| 74 | CAGCCACGGGTCAGCCACAA (SEQ ID | PE3 ngRNA spacer (GGG PAM) |
| | NO: 74) | |
| 75 | CGTGCCCTTCTCCAATGCGA (SEQ ID | PE3 ngRNA spacer (CGG PAM) |
| | NO: 75) | |
| 76 | CTTCTCCAATGCGACGGGTG (SEQ ID | PE3 ngRNA spacer (TGG PAM) |
| | NO: 76) | |
| 77 | GCAGCCACGGGTCAGCCACA (SEQ ID | PE3 ngRNA spacer (AGG PAM) |
| | NO: 77) | |
| 78 | GTGCCCTTCTCCAATGCGAC (SEQ ID | PE3 ngRNA spacer (GGG PAM) |
| | NO: 78) | |
| 79 | TCTTGGGTGGGAGCAGCCAC (SEQ ID | PE3 ngRNA spacer (GGG PAM) |
| | NO: 79) | |
| 80 | TTCTTGGGTGGGAGCAGCCA (SEQ ID | PE3 ngRNA spacer (CGG PAM) |
| | NO: 80) | |
| 81 | CGAGTATCCACAGTACTACC (SEQ ID | PE3b*1 ngRNA spacer (TGG PAM) |
| | NO: 81) | |
| 82 | CGAGTACCCACAGTACTACC (SEQ ID | PE3 ngRNA spacer (TGG PAM) |
| | NO: 82) | |
| 83 | GCTCAGCCAGGTAGTACTGTGTTTTAGA | pegRNA; contains gRNA core SEQ ID |
| | GCTAGAAATAGCAAGTTAAAATAAGGC | NO: 1854 |
| | TAGTCCGTTATCAACTTGAAAAAGTGGC | |
| | ACCGAGTCGGTGCAGCCCCTTCGAGTA | |
| | CCCACAGTACTACC (SEQ ID NO: 83) | |
| 84 | GCTCAGCCAGGTAGTACTGTGTTTTAGA | pegRNA; contains gRNA core SEQ ID |
| | GCTAGAAATAGCAAGTTAAAATAAGGC | NO: 1854 |
| | TAGTCCGTTATCAACTTGAAAAAGTGGC | |
| | ACCGAGTCGGTGCAGCCCCTTCGAGTA | |
| | CCCACAGTACTACCTG (SEQ ID NO: 84) | |
| 85 | GCTCAGCCAGGTAGTACTGTGTTTTAGA | pegRNA; contains gRNA core SEQ ID |
| | GCTAGAAATAGCAAGTTAAAATAAGGC | NO: 1854 |
| | TAGTCCGTTATCAACTTGAAAAAGTGGC | |
| | ACCGAGTCGGTGCGCAGCCCCTTCGAG | |
| | TACCCACAGTACTACC (SEQ ID NO: 85) | |
| 86 | GCTCAGCCAGGTAGTACTGTGTTTTAGA | pegRNA; contains gRNA core SEQ ID |
| | GCTAGAAATAGCAAGTTAAAATAAGGC | NO: 1854 |
| | TAGTCCGTTATCAACTTGAAAAAGTGGC | |
| | ACCGAGTCGGTGCAGCCCCTTCGAGTA | |
| | CCCACAGTACTACCTGG (SEQ ID NO: 86) | |
| 87 | GCTCAGCCAGGTAGTACTGTGTTTTAGA | pegRNA; contains gRNA core SEQ ID |
| | GCTAGAAATAGCAAGTTAAAATAAGGC | NO: 1854 |
| | TAGTCCGTTATCAACTTGAAAAAGTGGC | |
| | ACCGAGTCGGTGCGCAGCCCCTTCGAG | |
| | TACCCACAGTACTACCT (SEQ ID NO: 87) | |
| 88 | GCTCAGCCAGGTAGTACTGTGTTTTAGA | pegRNA*1 (GGG-to-GGA PAM |
| | GCTAGAAATAGCAAGTTAAAATAAGGC | silencing edit); contains gRNA core |
| | TAGTCCGTTATCAACTTGAAAAAGTGGC | SEQ ID NO: 1854 |
| | ACCGAGTCGGTGCAGCCCCTTCGAGTAT | |
| | CCACAGTACTACCTGG (SEQ ID NO: 88) | |
| 89 | GCTCAGCCAGGTAGTACTGTGTTTTAGA | pegRNA*1 (GGG-to-GGA PAM |
| | GCTAGAAATAGCAAGTTAAAATAAGGC | silencing edit); contains gRNA core |
| | TAGTCCGTTATCAACTTGAAAAAGTGGC | SEQ ID NO: 1854 |
| | ACCGAGTCGGTGCGCAGCCCCTTCGAG | |
| | TATCCACAGTACTACCT (SEQ ID NO: 89) | |
| 90 | GCTCAGCCAGGTAGTACTGTGTTTTAGA | pegRNA; contains gRNA core SEQ ID |
| | GCTAGAAATAGCAAGTTAAAATAAGGC | NO: 1854, and TTTT (sequence number |
| | TAGTCCGTTATCAACTTGAAAAAGTGGC | 1860) 3′ terminal sequence |
| | ACCGAGTCGGTGCAGCCCCTTCGAGTA | |
| | CCCACAGTACTACCTTTT (SEQ ID NO: | |
| | 90) | |
| 91 | GCTCAGCCAGGTAGTACTGTGTTTTAGA | pegRNA; contains gRNA core SEQ ID |
| | GCTAGAAATAGCAAGTTAAAATAAGGC | NO: 1854 |
| | TAGTCCGTTATCAACTTGAAAAAGTGGC | |
| | ACCGAGTCGGTGCAGCCCCTTCGAGTA | |
| | CCCACAGTACTACCTGGC (SEQ ID NO: | |
| | 91) | |
| 92 | GCTCAGCCAGGTAGTACTGTGTTTTAGA | pegRNA; contains gRNA core SEQ ID |
| | GCTAGAAATAGCAAGTTAAAATAAGGC | NO: 1854 |
| | TAGTCCGTTATCAACTTGAAAAAGTGGC | |
| | ACCGAGTCGGTGCGCAGCCCCTTCGAG | |
| | TACCCACAGTACTACCTG (SEQ ID NO: | |
| | 92) | |
| 93 | GCTCAGCCAGGTAGTACTGTGTTTTAGA | pegRNA; contains gRNA core SEQ ID |
| | GCTAGAAATAGCAAGTTAAAATAAGGC | NO: 1854 |
| | TAGTCCGTTATCAACTTGAAAAAGTGGC | |
| | ACCGAGTCGGTGCACGCAGCCCCTTCG | |
| | AGTACCCACAGTACTACC (SEQ ID NO: | |
| | 93) | |
| 94 | GCTCAGCCAGGTAGTACTGTGTTTTAGA | pegRNA*1 (GGG-to-GGA PAM |
| | GCTAGAAATAGCAAGTTAAAATAAGGC | silencing edit); contains gRNA core |
| | TAGTCCGTTATCAACTTGAAAAAGTGGC | SEQ ID NO: 1854 |
| | ACCGAGTCGGTGCAGCCCCTTCGAGTAT | |
| | CCACAGTACTACCTGGC (SEQ ID NO: 94) | |
| 95 | GCTCAGCCAGGTAGTACTGTGTTTTAGA | pegRNA*1 (GGG-to-GGA PAM |
| | GCTAGAAATAGCAAGTTAAAATAAGGC | silencing edit); contains gRNA core |
| | TAGTCCGTTATCAACTTGAAAAAGTGGC | SEQ ID NO: 1854 |
| | ACCGAGTCGGTGCGCAGCCCCTTCGAG | |
| | TATCCACAGTACTACCTG (SEQ ID NO: | |
| | 95) | |
| 96 | GCTCAGCCAGGTAGTACTGTGTTTTAGA | pegRNA; contains gRNA core SEQ ID |
| | GCTAGAAATAGCAAGTTAAAATAAGGC | NO: 1854 |
| | TAGTCCGTTATCAACTTGAAAAAGTGGC | |
| | ACCGAGTCGGTGCAGCCCCTTCGAGTA | |
| | CCCACAGTACTACCTGGCT (SEQ ID NO: | |
| | 96) | |
| 97 | GCTCAGCCAGGTAGTACTGTGTTTTAGA | pegRNA; contains gRNA core SEQ ID |
| | GCTAGAAATAGCAAGTTAAAATAAGGC | NO: 1854 |
| | TAGTCCGTTATCAACTTGAAAAAGTGGC | |
| | ACCGAGTCGGTGCGCAGCCCCTTCGAG | |
| | TACCCACAGTACTACCTGG (SEQ ID NO: | |
| | 97) | |
| 98 | GCTCAGCCAGGTAGTACTGTGTTTTAGA | pegRNA*1 (GGG-to-GGA PAM |
| | GCTAGAAATAGCAAGTTAAAATAAGGC | silencing edit); contains gRNA core |
| | TAGTCCGTTATCAACTTGAAAAAGTGGC | SEQ ID NO: 1854 |
| | ACCGAGTCGGTGCAGCCCCTTCGAGTAT | |
| | CCACAGTACTACCTGGCT (SEQ ID NO: | |
| | 98) | |
| 99 | GCTCAGCCAGGTAGTACTGTGTTTTAGA | pegRNA*1 (GGG-to-GGA PAM |
| | GCTAGAAATAGCAAGTTAAAATAAGGC | silencing edit); contains gRNA core |
| | TAGTCCGTTATCAACTTGAAAAAGTGGC | SEQ ID NO: 1854 |
| | ACCGAGTCGGTGCGCAGCCCCTTCGAG | |
| | TATCCACAGTACTACCTGG (SEQ ID NO: | |
| | 99) | |
| 100 | GCTCAGCCAGGTAGTACTGTGTTTAAGA | pegRNA; contains gRNA core SEQ ID |
| | GCTAGAAATAGCAAGTTTAAATAAGGC | NO: 1855 |
| | TAGTCCGTTATCAACTTGAAAAAGTGGC | |
| | ACCGAGTCGGTGCGCAGCCCCTTCGAG | |
| | TACCCACAGTACTACCTGG (SEQ ID NO: | |
| | 100) | |
| 101 | GCTCAGCCAGGTAGTACTGTGTTTAAGA | pegRNA; contains gRNA core SEQ ID |
| | GCTAGAAATAGCAAGTTTAAATAAGGC | NO: 1856 |
| | TAGTCCGTTATCAGCGTGAAAACGCGG | |
| | CACCGAGTCGGTGCGCAGCCCCTTCGA | |
| | GTACCCACAGTACTACCTGG (SEQ ID | |
| | NO: 101) | |
| 102 | GCTCAGCCAGGTAGTACTGTGTTTAAGA | pegRNA*1 (GGG-to-GGA PAM |
| | GCTAGAAATAGCAAGTTTAAATAAGGC | silencing edit); contains gRNA core |
| | TAGTCCGTTATCAACTTGAAAAAGTGGC | SEQ ID NO: 1855 |
| | ACCGAGTCGGTGCAGCCCCTTCGAGTAT | |
| | CCACAGTACTACCTGGCT (SEQ ID NO: | |
| | 102) | |
| 103 | GCTCAGCCAGGTAGTACTGTGTTTAAGA | pegRNA*1 (GGG-to-GGA PAM |
| | GCTAGAAATAGCAAGTTTAAATAAGGC | silencing edit); contains gRNA core |
| | TAGTCCGTTATCAGCGTGAAAACGCGG | SEQ ID NO: 1856 |
| | CACCGAGTCGGTGCAGCCCCTTCGAGT | |
| | ATCCACAGTACTACCTGGCT (SEQ ID | |
| | NO: 103) | |
| 104 | GCTCAGCCAGGTAGTACTGTGTTTTAGA | pegRNA; contains gRNA core SEQ ID |
| | GCTAGAAATAGCAAGTTAAAATAAGGC | NO: 1854, and TTTT (sequence number |
| | TAGTCCGTTATCAACTTGAAAAAGTGGC | 1860) 3′ terminal sequence |
| | ACCGAGTCGGTGCGCAGCCCCTTCGAG | |
| | TACCCACAGTACTACCTTTT (SEQ ID NO: | |
| | 104) | |
| 105 | GCTCAGCCAGGTAGTACTGTGTTTTAGA | pegRNA; contains gRNA core SEQ ID |
| | GCTAGAAATAGCAAGTTAAAATAAGGC | NO: 1854, and TTTT (sequence number |
| | TAGTCCGTTATCAACTTGAAAAAGTGGC | 1860) 3′ terminal sequence |
| | ACCGAGTCGGTGCAGCCCCTTCGAGTA | |
| | CCCACAGTACTACCTGTTTT (SEQ ID NO: | |
| | 105) | |
| 106 | GCTCAGCCAGGTAGTACTGTGTTTTAGA | pegRNA; contains gRNA core SEQ ID |
| | GCTAGAAATAGCAAGTTAAAATAAGGC | NO: 1854 |
| | TAGTCCGTTATCAACTTGAAAAAGTGGC | |
| | ACCGAGTCGGTGCAGCCCCTTCGAGTA | |
| | CCCACAGTACTACCTGGCTG (SEQ ID | |
| | NO: 106) | |
| 107 | GCTCAGCCAGGTAGTACTGTGTTTTAGA | pegRNA; contains gRNA core SEQ ID |
| | GCTAGAAATAGCAAGTTAAAATAAGGC | NO: 1854 |
| | TAGTCCGTTATCAACTTGAAAAAGTGGC | |
| | ACCGAGTCGGTGCGCAGCCCCTTCGAG | |
| | TACCCACAGTACTACCTGGC (SEQ ID | |
| | NO: 107) | |
| 108 | GCTCAGCCAGGTAGTACTGTGTTTTAGA | pegRNA; contains gRNA core SEQ ID |
| | GCTAGAAATAGCAAGTTAAAATAAGGC | NO: 1854 |
| | TAGTCCGTTATCAACTTGAAAAAGTGGC | |
| | ACCGAGTCGGTGCACGCAGCCCCTTCG | |
| | AGTACCCACAGTACTACCTG (SEQ ID | |
| | NO: 108) | |
| 109 | GCTCAGCCAGGTAGTACTGTGTTTTAGA | pegRNA; contains gRNA core SEQ ID |
| | GCTAGAAATAGCAAGTTAAAATAAGGC | NO: 1854 |
| | TAGTCCGTTATCAACTTGAAAAAGTGGC | |
| | ACCGAGTCGGTGCGTACGCAGCCCCTTC | |
| | GAGTACCCACAGTACTACC (SEQ ID NO: | |
| | 109) | |
| 110 | GCTCAGCCAGGTAGTACTGTGTTTTAGA | pegRNA*1 (GGG-to-GGA PAM |
| | GCTAGAAATAGCAAGTTAAAATAAGGC | silencing edit); contains gRNA core |
| | TAGTCCGTTATCAACTTGAAAAAGTGGC | SEQ ID NO: 1854 |
| | ACCGAGTCGGTGCAGCCCCTTCGAGTAT | |
| | CCACAGTACTACCTGGCTG (SEQ ID NO: | |
| | 110) | |
| 111 | GCTCAGCCAGGTAGTACTGTGTTTTAGA | pegRNA*1 (GGG-to-GGA PAM |
| | GCTAGAAATAGCAAGTTAAAATAAGGC | silencing edit); contains gRNA core |
| | TAGTCCGTTATCAACTTGAAAAAGTGGC | SEQ ID NO: 1854 |
| | ACCGAGTCGGTGCGCAGCCCCTTCGAG | |
| | TATCCACAGTACTACCTGGC (SEQ ID | |
| | NO: 111) | |
| 112 | GCTCAGCCAGGTAGTACTGTGTTTTAGA | pegRNA; contains gRNA core SEQ ID |
| | GCTAGAAATAGCAAGTTAAAATAAGGC | NO: 1854 |
| | TAGTCCGTTATCAACTTGAAAAAGTGGC | |
| | ACCGAGTCGGTGCAGCCCCTTCGAGTA | |
| | CCCACAGTACTACCTGGCTGA (SEQ ID | |
| | NO: 112) | |
| 113 | GCTCAGCCAGGTAGTACTGTGTTTTAGA | pegRNA; contains gRNA core SEQ ID |
| | GCTAGAAATAGCAAGTTAAAATAAGGC | NO: 1854 |
| | TAGTCCGTTATCAACTTGAAAAAGTGGC | |
| | ACCGAGTCGGTGCGCAGCCCCTTCGAG | |
| | TACCCACAGTACTACCTGGCT (SEQ ID | |
| | NO: 113) | |
| 114 | GCTCAGCCAGGTAGTACTGTGTTTTAGA | pegRNA*1 (GGG-to-GGA PAM |
| | GCTAGAAATAGCAAGTTAAAATAAGGC | silencing edit); contains gRNA core |
| | TAGTCCGTTATCAACTTGAAAAAGTGGC | SEQ ID NO: 1854 |
| | ACCGAGTCGGTGCAGCCCCTTCGAGTAT | |
| | CCACAGTACTACCTGGCTGA (SEQ ID | |
| | NO: 114) | |
| 115 | GCTCAGCCAGGTAGTACTGTGTTTTAGA | pegRNA*1 (GGG-to-GGA PAM |
| | GCTAGAAATAGCAAGTTAAAATAAGGC | silencing edit); contains gRNA core |
| | TAGTCCGTTATCAACTTGAAAAAGTGGC | SEQ ID NO: 1854 |
| | ACCGAGTCGGTGCGCAGCCCCTTCGAG | |
| | TATCCACAGTACTACCTGGCT (SEQ ID | |
| | NO: 115) | |
| 116 | GCTCAGCCAGGTAGTACTGTGTTTAAGA | pegRNA; contains gRNA core SEQ ID |
| | GCGGGGAAATCCGCAAGTTTAAATAAG | NO: 1857 |
| | GCTAGTCCGTTATCAGCGTGAAAACGC | |
| | GGCACCGAGTCGGTGCGCAGCCCCTTC | |
| | GAGTACCCACAGTACTACCTGG (SEQ ID | |
| | NO: 116) | |
| 117 | GCTCAGCCAGGTAGTACTGTGTTTAAGA | pegRNA*1 (GGG-to-GGA PAM |
| | GCGGGGAAATCCGCAAGTTTAAATAAG | silencing edit); contains gRNA core |
| | GCTAGTCCGTTATCAGCGTGAAAACGC | SEQ ID NO: 1857 |
| | GGCACCGAGTCGGTGCAGCCCCTTCGA | |
| | GTATCCACAGTACTACCTGGCT (SEQ ID | |
| | NO: 117) | |
| 118 | GCTCAGCCAGGTAGTACTGTGTTTAAGA | pegRNA*1 (GGG-to-GGA PAM |
| | GCTAGAAATAGCAAGTTTAAATAAGGC | silencing edit); contains gRNA core |
| | TAGTCCGTTATCAACTTGAAAAAGTGGC | SEQ ID NO: 1855 |
| | ACCGAGTCGGTGCAGCCCCTTCGAGTAT | |
| | CCACAGTACTACCTGGCTGA (SEQ ID | |
| | NO: 118) | |
| 119 | GCTCAGCCAGGTAGTACTGTGTTTAAGA | pegRNA*1 (GGG-to-GGA PAM |
| | GCTAGAAATAGCAAGTTTAAATAAGGC | silencing edit); contains gRNA core |
| | TAGTCCGTTATCAGCGTGAAAACGCGG | SEQ ID NO: 1856 |
| | CACCGAGTCGGTGCAGCCCCTTCGAGT | |
| | ATCCACAGTACTACCTGGCTGA (SEQ ID | |
| | NO: 119) | |
| 120 | GCTCAGCCAGGTAGTACTGTGTTTTAGA | pegRNA; contains gRNA core SEQ ID |
| | GCTAGAAATAGCAAGTTAAAATAAGGC | NO: 1854, and TTTT (sequence number |
| | TAGTCCGTTATCAACTTGAAAAAGTGGC | 1860) 3′ terminal sequence |
| | ACCGAGTCGGTGCACGCAGCCCCTTCG | |
| | AGTACCCACAGTACTACCTTTT (SEQ ID | |
| | NO: 120) | |
| 121 | GCTCAGCCAGGTAGTACTGTGTTTTAGA | pegRNA; contains gRNA core SEQ ID |
| | GCTAGAAATAGCAAGTTAAAATAAGGC | NO: 1854, and TTTT (sequence number |
| | TAGTCCGTTATCAACTTGAAAAAGTGGC | 1860) 3′ terminal sequence |
| | ACCGAGTCGGTGCGCAGCCCCTTCGAG | |
| | TACCCACAGTACTACCTGTTTT (SEQ ID | |
| | NO: 121) | |
| 122 | GCTCAGCCAGGTAGTACTGTGTTTTAGA | pegRNA; contains gRNA core SEQ ID |
| | GCTAGAAATAGCAAGTTAAAATAAGGC | NO: 1854, and TTTT (sequence number |
| | TAGTCCGTTATCAACTTGAAAAAGTGGC | 1860) 3′ terminal sequence |
| | ACCGAGTCGGTGCAGCCCCTTCGAGTA | |
| | CCCACAGTACTACCTGGCTTTT (SEQ ID | |
| | NO: 122) | |
| 123 | GCTCAGCCAGGTAGTACTGTGTTTTAGA | pegRNA; contains gRNA core SEQ ID |
| | GCTAGAAATAGCAAGTTAAAATAAGGC | NO: 1854 |
| | TAGTCCGTTATCAACTTGAAAAAGTGGC | |
| | ACCGAGTCGGTGCGCAGCCCCTTCGAG | |
| | TACCCACAGTACTACCTGGCTG (SEQ ID | |
| | NO: 123) | |
| 124 | GCTCAGCCAGGTAGTACTGTGTTTTAGA | pegRNA; contains gRNA core SEQ ID |
| | GCTAGAAATAGCAAGTTAAAATAAGGC | NO: 1854 |
| | TAGTCCGTTATCAACTTGAAAAAGTGGC | |
| | ACCGAGTCGGTGCACGCAGCCCCTTCG | |
| | AGTACCCACAGTACTACCTGGC (SEQ ID | |
| | NO: 124) | |
| 125 | GCTCAGCCAGGTAGTACTGTGTTTTAGA | pegRNA; contains gRNA core SEQ ID |
| | GCTAGAAATAGCAAGTTAAAATAAGGC | NO: 1854 |
| | TAGTCCGTTATCAACTTGAAAAAGTGGC | |
| | ACCGAGTCGGTGCGTACGCAGCCCCTTC | |
| | GAGTACCCACAGTACTACCTG (SEQ ID | |
| | NO: 125) | |
| 126 | GCTCAGCCAGGTAGTACTGTGTTTTAGA | pegRNA; contains gRNA core SEQ ID |
| | GCTAGAAATAGCAAGTTAAAATAAGGC | NO: 1854 |
| | TAGTCCGTTATCAACTTGAAAAAGTGGC | |
| | ACCGAGTCGGTGCTGGTACGCAGCCCC | |
| | TTCGAGTACCCACAGTACTACC (SEQ ID | |
| | NO: 126) | |
| 127 | GCTCAGCCAGGTAGTACTGTGTTTTAGA | pegRNA; contains gRNA core SEQ ID |
| | GCTAGAAATAGCAAGTTAAAATAAGGC | NO: 1854 |
| | TAGTCCGTTATCAACTTGAAAAAGTGGC | |
| | ACCGAGTCGGTGCAGCCCCTTCGAGTA | |
| | CCCACAGTACTACCTGGCTGAG (SEQ ID | |
| | NO: 127) | |
| 128 | GCTCAGCCAGGTAGTACTGTGTTTTAGA | pegRNA*1 (GGG-to-GGA PAM |
| | GCTAGAAATAGCAAGTTAAAATAAGGC | silencing edit); contains gRNA core |
| | TAGTCCGTTATCAACTTGAAAAAGTGGC | SEQ ID NO: 1854 |
| | ACCGAGTCGGTGCAGCCCCTTCGAGTAT | |
| | CCACAGTACTACCTGGCTGAG (SEQ ID | |
| | NO: 128) | |
| 129 | GCTCAGCCAGGTAGTACTGTGTTTTAGA | pegRNA*1 (GGG-to-GGA PAM |
| | GCTAGAAATAGCAAGTTAAAATAAGGC | silencing edit); contains gRNA core |
| | TAGTCCGTTATCAACTTGAAAAAGTGGC | SEQ ID NO: 1854 |
| | ACCGAGTCGGTGCGCAGCCCCTTCGAG | |
| | TATCCACAGTACTACCTGGCTG (SEQ ID | |
| | NO: 129) | |
| 130 | GCTCAGCCAGGTAGTACTGTGTTTTAGA | pegRNA; contains gRNA core SEQ ID |
| | GCTAGAAATAGCAAGTTAAAATAAGGC | NO: 1854 |
| | TAGTCCGTTATCAACTTGAAAAAGTGGC | |
| | ACCGAGTCGGTGCGCAGCCCCTTCGAG | |
| | TACCCACAGTACTACCTGGCTGA (SEQ | |
| | ID NO: 130) | |
| 131 | GCTCAGCCAGGTAGTACTGTGTTTTAGA | pegRNA*1 (GGG-to-GGA PAM |
| | GCTAGAAATAGCAAGTTAAAATAAGGC | silencing edit); contains gRNA core |
| | TAGTCCGTTATCAACTTGAAAAAGTGGC | SEQ ID NO: 1854 |
| | ACCGAGTCGGTGCGCAGCCCCTTCGAG | |
| | TATCCACAGTACTACCTGGCTGA (SEQ | |
| | ID NO: 131) | |
| 132 | GCTCAGCCAGGTAGTACTGTGTTTAAGA | pegRNA*1 (GGG-to-GGA PAM |
| | GCGGGGAAATCCGCAAGTTTAAATAAG | silencing edit); contains gRNA core |
| | GCTAGTCCGTTATCAGCGTGAAAACGC | SEQ ID NO: 1857 |
| | GGCACCGAGTCGGTGCAGCCCCTTCGA | |
| | GTATCCACAGTACTACCTGGCTGA (SEQ | |
| | ID NO: 132) | |
| 133 | GCTCAGCCAGGTAGTACTGTGTTTAAGA | pegRNA*1 (GGG-to-GGA PAM |
| | GCTAGAAATAGCAAGTTTAAATAAGGC | silencing edit); contains gRNA core |
| | TAGTCCGTTATCAACTTGAAAAAGTGGC | SEQ ID NO: 1855 |
| | ACCGAGTCGGTGCGCAGCCCCTTCGAG | |
| | TATCCACAGTACTACCTGGCTGA (SEQ | |
| | ID NO: 133) | |
| 134 | GCTCAGCCAGGTAGTACTGTGTTTAAGA | pegRNA*1 (GGG-to-GGA PAM |
| | GCTAGAAATAGCAAGTTTAAATAAGGC | silencing edit); contains gRNA core |
| | TAGTCCGTTATCAGCGTGAAAACGCGG | SEQ ID NO: 1856 |
| | CACCGAGTCGGTGCGCAGCCCCTTCGA | |
| | GTATCCACAGTACTACCTGGCTGA (SEQ | |
| | ID NO: 134) | |
| 135 | GCTCAGCCAGGTAGTACTGTGTTTTAGA | pegRNA; contains gRNA core SEQ ID |
| | GCTAGAAATAGCAAGTTAAAATAAGGC | NO: 1854, and TTTT (sequence number |
| | TAGTCCGTTATCAACTTGAAAAAGTGGC | 1860) 3′ terminal sequence |
| | ACCGAGTCGGTGCGTACGCAGCCCCTTC | |
| | GAGTACCCACAGTACTACCTTTT (SEQ | |
| | ID NO: 135) | |
| 136 | GCTCAGCCAGGTAGTACTGTGTTTTAGA | pegRNA; contains gRNA core SEQ ID |
| | GCTAGAAATAGCAAGTTAAAATAAGGC | NO: 1854, and TTTT (sequence number |
| | TAGTCCGTTATCAACTTGAAAAAGTGGC | 1860) 3′ terminal sequence |
| | ACCGAGTCGGTGCACGCAGCCCCTTCG | |
| | AGTACCCACAGTACTACCTGTTTT (SEQ | |
| | ID NO: 136) | |
| 137 | GCTCAGCCAGGTAGTACTGTGTTTTAGA | pegRNA; contains gRNA core SEQ ID |
| | GCTAGAAATAGCAAGTTAAAATAAGGC | NO: 1854, and TTTT (sequence number |
| | TAGTCCGTTATCAACTTGAAAAAGTGGC | 1860) 3′ terminal sequence |
| | ACCGAGTCGGTGCGCAGCCCCTTCGAG | |
| | TACCCACAGTACTACCTGGCTTTT (SEQ | |
| | ID NO: 137) | |
| 138 | GCTCAGCCAGGTAGTACTGTGTTTTAGA | pegRNA; contains gRNA core SEQ ID |
| | GCTAGAAATAGCAAGTTAAAATAAGGC | NO: 1854, and TTTT (sequence number |
| | TAGTCCGTTATCAACTTGAAAAAGTGGC | 1860) 3′ terminal sequence |
| | ACCGAGTCGGTGCAGCCCCTTCGAGTA | |
| | CCCACAGTACTACCTGGCTGTTTT (SEQ | |
| | ID NO: 138) | |
| 139 | GCTCAGCCAGGTAGTACTGTGTTTTAGA | pegRNA; contains gRNA core SEQ ID |
| | GCTAGAAATAGCAAGTTAAAATAAGGC | NO: 1854 |
| | TAGTCCGTTATCAACTTGAAAAAGTGGC | |
| | ACCGAGTCGGTGCACGCAGCCCCTTCG | |
| | AGTACCCACAGTACTACCTGGCTG (SEQ | |
| | ID NO: 139) | |
| 140 | GCTCAGCCAGGTAGTACTGTGTTTTAGA | pegRNA; contains gRNA core SEQ ID |
| | GCTAGAAATAGCAAGTTAAAATAAGGC | NO: 1854 |
| | TAGTCCGTTATCAACTTGAAAAAGTGGC | |
| | ACCGAGTCGGTGCGTACGCAGCCCCTTC | |
| | GAGTACCCACAGTACTACCTGGC (SEQ | |
| | ID NO: 140) | |
| 141 | GCTCAGCCAGGTAGTACTGTGTTTTAGA | pegRNA; contains gRNA core SEQ ID |
| | GCTAGAAATAGCAAGTTAAAATAAGGC | NO: 1854 |
| | TAGTCCGTTATCAACTTGAAAAAGTGGC | |
| | ACCGAGTCGGTGCTGGTACGCAGCCCC | |
| | TTCGAGTACCCACAGTACTACCTG (SEQ | |
| | ID NO: 141) | |
| 142 | GCTCAGCCAGGTAGTACTGTGTTTTAGA | pegRNA; contains gRNA core SEQ ID |
| | GCTAGAAATAGCAAGTTAAAATAAGGC | NO: 1854 |
| | TAGTCCGTTATCAACTTGAAAAAGTGGC | |
| | ACCGAGTCGGTGCTGTGGTACGCAGCC | |
| | CCTTCGAGTACCCACAGTACTACC (SEQ | |
| | ID NO: 142) | |
| 143 | GCTCAGCCAGGTAGTACTGTGTTTTAGA | pegRNA; contains gRNA core SEQ ID |
| | GCTAGAAATAGCAAGTTAAAATAAGGC | NO: 1854 |
| | TAGTCCGTTATCAACTTGAAAAAGTGGC | |
| | ACCGAGTCGGTGCGCAGCCCCTTCGAG | |
| | TACCCACAGTACTACCTGGCTGAG (SEQ | |
| | ID NO: 143) | |
| 144 | GCTCAGCCAGGTAGTACTGTGTTTTAGA | pegRNA*1 (GGG-to-GGA PAM |
| | GCTAGAAATAGCAAGTTAAAATAAGGC | silencing edit); contains gRNA core |
| | TAGTCCGTTATCAACTTGAAAAAGTGGC | SEQ ID NO: 1854 |
| | ACCGAGTCGGTGCGCAGCCCCTTCGAG | |
| | TATCCACAGTACTACCTGGCTGAG (SEQ | |
| | ID NO: 144) | |
| 145 | GCTCAGCCAGGTAGTACTGTGTTTAAGA | pegRNA*1 (GGG-to-GGA PAM |
| | GCGGGGAAATCCGCAAGTTTAAATAAG | silencing edit); contains gRNA core |
| | GCTAGTCCGTTATCAGCGTGAAAACGC | SEQ ID NO: 1857 |
| | GGCACCGAGTCGGTGCGCAGCCCCTTC | |
| | GAGTATCCACAGTACTACCTGGCTGA | |
| | (SEQ ID NO: 145) | |
| 146 | GCTCAGCCAGGTAGTACTGTGTTTAAGA | pegRNA; contains gRNA core SEQ ID |
| | GCTAGAAATAGCAAGTTTAAATAAGGC | NO: 1856, and transcription adaptations |
| | TAGTCCGTTATCAGCGTGAAAACGCGG | |
| | CACCGAGTCGGTGCGCAGCCCCTTCGA | |
| | GTACCCACAGTACTACCTGGTTTTTTT | |
| | (SEQ ID NO: 146) | |
| 147 | GCTCAGCCAGGTAGTACTGTGTTTAAGA | pegRNA*1 (GGG-to-GGA PAM |
| | GCTAGAAATAGCAAGTTTAAATAAGGC | silencing edit); contains gRNA core |
| | TAGTCCGTTATCAGCGTGAAAACGCGG | SEQ ID NO: 1856, and transcription |
| | CACCGAGTCGGTGCAGCCCCTTCGAGT | adaptations |
| | ATCCACAGTACTACCTGGCTTTTTTTT | |
| | (SEQ ID NO: 147) | |
| 148 | GCTCAGCCAGGTAGTACTGTGTTTTAGA | pegRNA; contains gRNA core SEQ ID |
| | GCTAGAAATAGCAAGTTAAAATAAGGC | NO: 1854, and TTTT (sequence number |
| | TAGTCCGTTATCAACTTGAAAAAGTGGC | 1860) 3′ terminal sequence |
| | ACCGAGTCGGTGCGTACGCAGCCCCTTC | |
| | GAGTACCCACAGTACTACCTGTTTT | |
| | (SEQ ID NO: 148) | |
| 149 | GCTCAGCCAGGTAGTACTGTGTTTTAGA | pegRNA; contains gRNA core SEQ ID |
| | GCTAGAAATAGCAAGTTAAAATAAGGC | NO: 1854, and TTTT (sequence number |
| | TAGTCCGTTATCAACTTGAAAAAGTGGC | 1860) 3′ terminal sequence |
| | ACCGAGTCGGTGCACGCAGCCCCTTCG | |
| | AGTACCCACAGTACTACCTGGCTTTT | |
| | (SEQ ID NO: 149) | |
| 150 | GCTCAGCCAGGTAGTACTGTGTTTTAGA | pegRNA; contains gRNA core SEQ ID |
| | GCTAGAAATAGCAAGTTAAAATAAGGC | NO: 1854, and TTTT (sequence number |
| | TAGTCCGTTATCAACTTGAAAAAGTGGC | 1860) 3′ terminal sequence |
| | ACCGAGTCGGTGCGCAGCCCCTTCGAG | |
| | TACCCACAGTACTACCTGGCTGTTTT | |
| | (SEQ ID NO: 150) | |
| 151 | GCTCAGCCAGGTAGTACTGTGTTTTAGA | pegRNA; contains gRNA core SEQ ID |
| | GCTAGAAATAGCAAGTTAAAATAAGGC | NO: 1854 |
| | TAGTCCGTTATCAACTTGAAAAAGTGGC | |
| | ACCGAGTCGGTGCGTACGCAGCCCCTTC | |
| | GAGTACCCACAGTACTACCTGGCTG | |
| | (SEQ ID NO: 151) | |
| 152 | GCTCAGCCAGGTAGTACTGTGTTTTAGA | pegRNA; contains gRNA core SEQ ID |
| | GCTAGAAATAGCAAGTTAAAATAAGGC | NO: 1854 |
| | TAGTCCGTTATCAACTTGAAAAAGTGGC | |
| | ACCGAGTCGGTGCTGGTACGCAGCCCC | |
| | TTCGAGTACCCACAGTACTACCTGGC | |
| | (SEQ ID NO: 152) | |
| 153 | GCTCAGCCAGGTAGTACTGTGTTTTAGA | pegRNA; contains gRNA core SEQ ID |
| | GCTAGAAATAGCAAGTTAAAATAAGGC | NO: 1854 |
| | TAGTCCGTTATCAACTTGAAAAAGTGGC | |
| | ACCGAGTCGGTGCTGTGGTACGCAGCC | |
| | CCTTCGAGTACCCACAGTACTACCTG | |
| | (SEQ ID NO: 153) | |
| 154 | GCTCAGCCAGGTAGTACTGTGTTTAAGA | pegRNA*1 (GGG-to-GGA PAM |
| | GCTAGAAATAGCAAGTTTAAATAAGGC | silencing edit); contains gRNA core |
| | TAGTCCGTTATCAGCGTGAAAACGCGG | SEQ ID NO: 1856, and transcription |
| | CACCGAGTCGGTGCAGCCCCTTCGAGT | adaptations |
| | ATCCACAGTACTACCTGGCTGATTTTTT | |
| | T (SEQ ID NO: 154) | |
| 155 | GCTCAGCCAGGTAGTACTGTGTTTTAGA | pegRNA; contains gRNA core SEQ ID |
| | GCTAGAAATAGCAAGTTAAAATAAGGC | NO: 1854, and TTTT (sequence number |
| | TAGTCCGTTATCAACTTGAAAAAGTGGC | 1860) 3′ terminal sequence |
| | ACCGAGTCGGTGCGTACGCAGCCCCTTC | |
| | GAGTACCCACAGTACTACCTGGCTTTT | |
| | (SEQ ID NO: 155) | |
| 156 | GCTCAGCCAGGTAGTACTGTGTTTTAGA | pegRNA; contains gRNA core SEQ ID |
| | GCTAGAAATAGCAAGTTAAAATAAGGC | NO: 1854, and TTTT (sequence number |
| | TAGTCCGTTATCAACTTGAAAAAGTGGC | 1860) 3′ terminal sequence |
| | ACCGAGTCGGTGCACGCAGCCCCTTCG | |
| | AGTACCCACAGTACTACCTGGCTGTTTT | |
| | (SEQ ID NO: 156) | |
| 157 | GCTCAGCCAGGTAGTACTGTGTTTTAGA | pegRNA; contains gRNA core SEQ ID |
| | GCTAGAAATAGCAAGTTAAAATAAGGC | NO: 1854 |
| | TAGTCCGTTATCAACTTGAAAAAGTGGC | |
| | ACCGAGTCGGTGCTGGTACGCAGCCCC | |
| | TTCGAGTACCCACAGTACTACCTGGCTG | |
| | (SEQ ID NO: 157) | |
| 158 | GCTCAGCCAGGTAGTACTGTGTTTTAGA | pegRNA; contains gRNA core SEQ ID |
| | GCTAGAAATAGCAAGTTAAAATAAGGC | NO: 1854 |
| | TAGTCCGTTATCAACTTGAAAAAGTGGC | |
| | ACCGAGTCGGTGCTGTGGTACGCAGCC | |
| | CCTTCGAGTACCCACAGTACTACCTGGC | |
| | (SEQ ID NO: 158) | |
| 159 | GCTCAGCCAGGTAGTACTGTGTTTAAGA | pegRNA; contains gRNA core SEQ ID |
| | GCTATGCTGGAAACAGCATAGCAAGTT | NO: 1858 |
| | TAAATAAGGCTAGTCCGTTATCAACTTG | |
| | AAAAAGTGGCACCGAGTCGGTGCGCAG | |
| | CCCCTTCGAGTACCCACAGTACTACCTG | |
| | G (SEQ ID NO: 159) | |
| 160 | GCTCAGCCAGGTAGTACTGTGTTTAAGA | pegRNA; contains gRNA core SEQ ID |
| | GCTATGCTGGAAACAGCATAGCAAGTT | NO: 1859 |
| | TAAATAAGGCTAGTCCGTTATCAGCGTG | |
| | AAAACGCGGCACCGAGTCGGTGCGCAG | |
| | CCCCTTCGAGTACCCACAGTACTACCTG | |
| | G (SEQ ID NO: 160) | |
| 161 | GCTCAGCCAGGTAGTACTGTGTTTAAGA | pegRNA*1 (GGG-to-GGA PAM |
| | GCTATGCTGGAAACAGCATAGCAAGTT | silencing edit); contains gRNA core |
| | TAAATAAGGCTAGTCCGTTATCAACTTG | SEQ ID NO: 1858 |
| | AAAAAGTGGCACCGAGTCGGTGCAGCC | |
| | CCTTCGAGTATCCACAGTACTACCTGGC | |
| | T (SEQ ID NO: 161) | |
| 162 | GCTCAGCCAGGTAGTACTGTGTTTAAGA | pegRNA*1 (GGG-to-GGA PAM |
| | GCTATGCTGGAAACAGCATAGCAAGTT | silencing edit); contains gRNA core |
| | TAAATAAGGCTAGTCCGTTATCAGCGTG | SEQ ID NO: 1859 |
| | AAAACGCGGCACCGAGTCGGTGCAGCC | |
| | CCTTCGAGTATCCACAGTACTACCTGGC | |
| | T (SEQ ID NO: 162) | |
| 163 | GCTCAGCCAGGTAGTACTGTGTTTAAGA | pegRNA*1 (GGG-to-GGA PAM |
| | GCTAGAAATAGCAAGTTTAAATAAGGC | silencing edit); contains gRNA core |
| | TAGTCCGTTATCAGCGTGAAAACGCGG | SEQ ID NO: 1856, and transcription |
| | CACCGAGTCGGTGCGCAGCCCCTTCGA | adaptations |
| | GTATCCACAGTACTACCTGGCTGATTTT | |
| | TTT (SEQ ID NO: 163) | |
| 164 | GCTCAGCCAGGTAGTACTGTGTTTTAGA | pegRNA; contains gRNA core SEQ ID |
| | GCTAGAAATAGCAAGTTAAAATAAGGC | NO: 1854, and TTTT (sequence number |
| | TAGTCCGTTATCAACTTGAAAAAGTGGC | 1860) 3′ terminal sequence |
| | ACCGAGTCGGTGCGTACGCAGCCCCTTC | |
| | GAGTACCCACAGTACTACCTGGCTGTTT | |
| | T (SEQ ID NO: 164) | |
| 165 | GCTCAGCCAGGTAGTACTGTGTTTTAGA | pegRNA; contains gRNA core SEQ ID |
| | GCTAGAAATAGCAAGTTAAAATAAGGC | NO: 1854 |
| | TAGTCCGTTATCAACTTGAAAAAGTGGC | |
| | ACCGAGTCGGTGCTGTGGTACGCAGCC | |
| | CCTTCGAGTACCCACAGTACTACCTGGC | |
| | TG (SEQ ID NO: 165) | |
| 166 | GCTCAGCCAGGTAGTACTGTGTTTAAGA | pegRNA*1 (GGG-to-GGA PAM |
| | GCTATGCTGGAAACAGCATAGCAAGTT | silencing edit); contains gRNA core |
| | TAAATAAGGCTAGTCCGTTATCAACTTG | SEQ ID NO: 1858 |
| | AAAAAGTGGCACCGAGTCGGTGCAGCC | |
| | CCTTCGAGTATCCACAGTACTACCTGGC | |
| | TGA (SEQ ID NO: 166) | |
| 167 | GCTCAGCCAGGTAGTACTGTGTTTAAGA | pegRNA*1 (GGG-to-GGA PAM |
| | GCTATGCTGGAAACAGCATAGCAAGTT | silencing edit); contains gRNA core |
| | TAAATAAGGCTAGTCCGTTATCAGCGTG | SEQ ID NO: 1859 |
| | AAAACGCGGCACCGAGTCGGTGCAGCC | |
| | CCTTCGAGTATCCACAGTACTACCTGGC | |
| | TGA (SEQ ID NO: 167) | |
| 168 | GCTCAGCCAGGTAGTACTGTGTTTAAGA | pegRNA*1 (GGG-to-GGA PAM |
| | GCTATGCTGGAAACAGCATAGCAAGTT | silencing edit); contains gRNA core |
| | TAAATAAGGCTAGTCCGTTATCAACTTG | SEQ ID NO: 1858 |
| | AAAAAGTGGCACCGAGTCGGTGCGCAG | |
| | CCCCTTCGAGTATCCACAGTACTACCTG | |
| | GCTGA (SEQ ID NO: 168) | |
| 169 | GCTCAGCCAGGTAGTACTGTGTTTAAGA | pegRNA*1 (GGG-to-GGA PAM |
| | GCTATGCTGGAAACAGCATAGCAAGTT | silencing edit); contains gRNA core |
| | TAAATAAGGCTAGTCCGTTATCAGCGTG | SEQ ID NO: 1859 |
| | AAAACGCGGCACCGAGTCGGTGCGCAG | |
| | CCCCTTCGAGTATCCACAGTACTACCTG | |
| | GCTGA (SEQ ID NO: 169) | |
| 170 | GCTCAGCCAGGTAGTACTGTGTTTAAGA | pegRNA; contains gRNA core SEQ ID |
| | GCTAGAAATAGCAAGTTTAAATAAGGC | NO: 1856, Linker [ATTCGT (Sequence |
| | TAGTCCGTTATCAGCGTGAAAACGCGG | Number: 1647)] + Seq. Spec. 3′ Motif |
| | CACCGAGTCGGTGCGCAGCCCCTTCGA | [GGCTGC (Sequence Number: 1774)], |
| | GTACCCACAGTACTACCTGGATTCGTGG | and transcription adaptations |
| | CTGCTTTTTTT (SEQ ID NO: 170) | |
| 171 | GCTCAGCCAGGTAGTACTGTGTTTAAGA | pegRNA; contains gRNA core SEQ ID |
| | GCTAGAAATAGCAAGTTTAAATAAGGC | NO: 1856, Linker [AATACA |
| | TAGTCCGTTATCAGCGTGAAAACGCGG | (Sequence Number: 1648)] + Seq. Spec. |
| | CACCGAGTCGGTGCGCAGCCCCTTCGA | 3′ Motif [GGGCTG (Sequence Number: |
| | GTACCCACAGTACTACCTGGAATACAG | 1775)], and transcription adaptations |
| | GGCTGTTTTTTT (SEQ ID NO: 171) | |
| 172 | GCTCAGCCAGGTAGTACTGTGTTTAAGA | pegRNA; contains gRNA core SEQ ID |
| | GCTAGAAATAGCAAGTTTAAATAAGGC | NO: 1856, Linker [ATAGTG |
| | TAGTCCGTTATCAGCGTGAAAACGCGG | (Sequence Number: 1649)] + Seq. Spec. |
| | CACCGAGTCGGTGCGCAGCCCCTTCGA | 3′ Motif [GGGGCT (Sequence Number: |
| | GTACCCACAGTACTACCTGGATAGTGG | 1776)], and transcription adaptations |
| | GGGCTTTTTTTT (SEQ ID NO: 172) | |
| 173 | GCTCAGCCAGGTAGTACTGTGTTTAAGA | pegRNA; contains gRNA core SEQ ID |
| | GCTAGAAATAGCAAGTTTAAATAAGGC | NO: 1856, Linker [AGAAAG |
| | TAGTCCGTTATCAGCGTGAAAACGCGG | (Sequence Number: 1650)] + Seq. Spec. |
| | CACCGAGTCGGTGCGCAGCCCCTTCGA | 3′ Motif [AGGGGC (Sequence |
| | GTACCCACAGTACTACCTGGAGAAAGA | Number: 1777)], and transcription |
| | GGGGCTTTTTTT (SEQ ID NO: 173) | adaptations |
| 174 | GCTCAGCCAGGTAGTACTGTGTTTAAGA | pegRNA; contains gRNA core SEQ ID |
| | GCTAGAAATAGCAAGTTTAAATAAGGC | NO: 1856, Linker [AATAAA |
| | TAGTCCGTTATCAGCGTGAAAACGCGG | (Sequence Number: 1651)] + Seq. Spec. |
| | CACCGAGTCGGTGCGCAGCCCCTTCGA | 3′ Motif [AAGGGG (Sequence |
| | GTACCCACAGTACTACCTGGAATAAAA | Number: 1778)], and transcription |
| | AGGGGTTTTTTT (SEQ ID NO: 174) | adaptations |
| 175 | GCTCAGCCAGGTAGTACTGTGTTTAAGA | pegRNA; contains gRNA core SEQ ID |
| | GCTAGAAATAGCAAGTTTAAATAAGGC | NO: 1856, Linker [AATAAT |
| | TAGTCCGTTATCAGCGTGAAAACGCGG | (Sequence Number: 1652)] + Seq. Spec. |
| | CACCGAGTCGGTGCGCAGCCCCTTCGA | 3′ Motif [GAAGGG (Sequence |
| | GTACCCACAGTACTACCTGGAATAATG | Number: 1779)], and transcription |
| | AAGGGTTTTTTT (SEQ ID NO: 175) | adaptations |
| 176 | GCTCAGCCAGGTAGTACTGTGTTTAAGA | pegRNA; contains gRNA core SEQ ID |
| | GCTAGAAATAGCAAGTTTAAATAAGGC | NO: 1856, Linker [ATTCAA (Sequence |
| | TAGTCCGTTATCAGCGTGAAAACGCGG | Number: 1653)] + Seq. Spec. 3′ Motif |
| | CACCGAGTCGGTGCGCAGCCCCTTCGA | [CGAAGG (Sequence Number: 1780)], |
| | GTACCCACAGTACTACCTGGATTCAACG | and transcription adaptations |
| | AAGGTTTTTTT (SEQ ID NO: 176) | |
| 177 | GCTCAGCCAGGTAGTACTGTGTTTAAGA | pegRNA; contains gRNA core SEQ ID |
| | GCTAGAAATAGCAAGTTTAAATAAGGC | NO: 1856, Linker [ACCTTG (Sequence |
| | TAGTCCGTTATCAGCGTGAAAACGCGG | Number: 1654)] + Seq. Spec. 3′ Motif |
| | CACCGAGTCGGTGCGCAGCCCCTTCGA | [TCGAAG (Sequence Number: 1781)], |
| | GTACCCACAGTACTACCTGGACCTTGTC | and transcription adaptations |
| | GAAGTTTTTTT (SEQ ID NO: 177) | |
| 178 | GCTCAGCCAGGTAGTACTGTGTTTAAGA | pegRNA; contains gRNA core SEQ ID |
| | GCTAGAAATAGCAAGTTTAAATAAGGC | NO: 1856, Linker [ACCTCT (Sequence |
| | TAGTCCGTTATCAGCGTGAAAACGCGG | Number: 1655)] + Seq. Spec. 3′ Motif |
| | CACCGAGTCGGTGCGCAGCCCCTTCGA | [CTCGAA (Sequence Number: 1782)], |
| | GTACCCACAGTACTACCTGGACCTCTCT | and transcription adaptations |
| | CGAATTTTTTT (SEQ ID NO: 178) | |
| 179 | GCTCAGCCAGGTAGTACTGTGTTTAAGA | pegRNA; contains gRNA core SEQ ID |
| | GCTAGAAATAGCAAGTTTAAATAAGGC | NO: 1856, Linker [AACTAG |
| | TAGTCCGTTATCAGCGTGAAAACGCGG | (Sequence Number: 1656)] + Seq. Spec. |
| | CACCGAGTCGGTGCGCAGCCCCTTCGA | 3′ Motif [ACTCGA (Sequence Number: |
| | GTACCCACAGTACTACCTGGAACTAGA | 1783)], and transcription adaptations |
| | CTCGATTTTTTT (SEQ ID NO: 179) | |
| 180 | GCTCAGCCAGGTAGTACTGTGTTTAAGA | pegRNA; contains gRNA core SEQ ID |
| | GCTAGAAATAGCAAGTTTAAATAAGGC | NO: 1856, Linker [AAGTCG |
| | TAGTCCGTTATCAGCGTGAAAACGCGG | (Sequence Number: 1657)] + Seq. Spec. |
| | CACCGAGTCGGTGCGCAGCCCCTTCGA | 3′ Motif [TACTCG (Sequence Number: |
| | GTACCCACAGTACTACCTGGAAGTCGT | 1784)], and transcription adaptations |
| | ACTCGTTTTTTT (SEQ ID NO: 180) | |
| 181 | GCTCAGCCAGGTAGTACTGTGTTTAAGA | pegRNA; contains gRNA core SEQ ID |
| | GCTAGAAATAGCAAGTTTAAATAAGGC | NO: 1856, Linker [AAGTCC |
| | TAGTCCGTTATCAGCGTGAAAACGCGG | (Sequence Number: 1658)] + Seq. Spec. |
| | CACCGAGTCGGTGCGCAGCCCCTTCGA | 3′ Motif [GTACTC (Sequence Number: |
| | GTACCCACAGTACTACCTGGAAGTCCGT | 1785)], and transcription adaptations |
| | ACTCTTTTTTT (SEQ ID NO: 181) | |
| 182 | GCTCAGCCAGGTAGTACTGTGTTTAAGA | pegRNA; contains gRNA core SEQ ID |
| | GCTAGAAATAGCAAGTTTAAATAAGGC | NO: 1856, Linker [ATAGAT |
| | TAGTCCGTTATCAGCGTGAAAACGCGG | (Sequence Number: 1659)] + Seq. Spec. |
| | CACCGAGTCGGTGCGCAGCCCCTTCGA | 3′ Motif [GGTACT (Sequence Number: |
| | GTACCCACAGTACTACCTGGATAGATG | 1786)], and transcription adaptations |
| | GTACTTTTTTTT (SEQ ID NO: 182) | |
| 183 | GCTCAGCCAGGTAGTACTGTGTTTAAGA | pegRNA; contains gRNA core SEQ ID |
| | GCTAGAAATAGCAAGTTTAAATAAGGC | NO: 1856, Linker [AAAAAC |
| | TAGTCCGTTATCAGCGTGAAAACGCGG | (Sequence Number: 1660)] + Seq. Spec. |
| | CACCGAGTCGGTGCGCAGCCCCTTCGA | 3′ Motif [GGGTAC (Sequence Number: |
| | GTACCCACAGTACTACCTGGAAAAACG | 1787)], and transcription adaptations |
| | GGTACTTTTTTT (SEQ ID NO: 183) | |
| 184 | GCTCAGCCAGGTAGTACTGTGTTTAAGA | pegRNA; contains gRNA core SEQ ID |
| | GCTAGAAATAGCAAGTTTAAATAAGGC | NO: 1856, Linker [AAAAAA |
| | TAGTCCGTTATCAGCGTGAAAACGCGG | (Sequence Number: 1661)] + Seq. Spec. |
| | CACCGAGTCGGTGCGCAGCCCCTTCGA | 3′ Motif [TGGGTA (Sequence Number: |
| | GTACCCACAGTACTACCTGGAAAAAAT | 1788)], and transcription adaptations |
| | GGGTATTTTTTT (SEQ ID NO: 184) | |
| 185 | GCTCAGCCAGGTAGTACTGTGTTTAAGA | pegRNA; contains gRNA core SEQ ID |
| | GCTAGAAATAGCAAGTTTAAATAAGGC | NO: 1856, Linker [ATCATG (Sequence |
| | TAGTCCGTTATCAGCGTGAAAACGCGG | Number: 1662)] + Seq. Spec. 3′ Motif |
| | CACCGAGTCGGTGCGCAGCCCCTTCGA | [GTGGGT (Sequence Number: 1789)], |
| | GTACCCACAGTACTACCTGGATCATGGT | and transcription adaptations |
| | GGGTTTTTTTT (SEQ ID NO: 185) | |
| 186 | GCTCAGCCAGGTAGTACTGTGTTTAAGA | pegRNA; contains gRNA core SEQ ID |
| | GCTAGAAATAGCAAGTTTAAATAAGGC | NO: 1856, Linker [AAAAAA |
| | TAGTCCGTTATCAGCGTGAAAACGCGG | (Sequence Number: 1661)] + Seq. Spec. |
| | CACCGAGTCGGTGCGCAGCCCCTTCGA | 3′ Motif [TGTGGG (Sequence Number: |
| | GTACCCACAGTACTACCTGGAAAAAAT | 1790)], and transcription adaptations |
| | GTGGGTTTTTTT (SEQ ID NO: 186) | |
| 187 | GCTCAGCCAGGTAGTACTGTGTTTAAGA | pegRNA*1 (GGG-to-GGA PAM |
| | GCTAGAAATAGCAAGTTTAAATAAGGC | silencing edit); contains gRNA core |
| | TAGTCCGTTATCAGCGTGAAAACGCGG | SEQ ID NO: 1856, Linker [AACACT |
| | CACCGAGTCGGTGCAGCCCCTTCGAGT | (Sequence Number: 1663)] + Seq. Spec. |
| | ATCCACAGTACTACCTGGCTAACACTGG | 3′ Motif [GGGGCT (Sequence Number: |
| | GGCTTTTTTTT (SEQ ID NO: 187) | 1776)], and transcription adaptations |
| 188 | GCTCAGCCAGGTAGTACTGTGTTTAAGA | pegRNA*1 (GGG-to-GGA PAM |
| | GCTAGAAATAGCAAGTTTAAATAAGGC | silencing edit); contains gRNA core |
| | TAGTCCGTTATCAGCGTGAAAACGCGG | SEQ ID NO: 1856, Linker [TCACAA |
| | CACCGAGTCGGTGCAGCCCCTTCGAGT | (Sequence Number: 1664)] + Seq. Spec. |
| | ATCCACAGTACTACCTGGCTTCACAAAG | 3′ Motif [AGGGGC (Sequence |
| | GGGCTTTTTTT (SEQ ID NO: 188) | Number: 1777)], and transcription |
| | | adaptations |
| 189 | GCTCAGCCAGGTAGTACTGTGTTTAAGA | pegRNA*1 (GGG-to-GGA PAM |
| | GCTAGAAATAGCAAGTTTAAATAAGGC | silencing edit); contains gRNA core |
| | TAGTCCGTTATCAGCGTGAAAACGCGG | SEQ ID NO: 1856, Linker [TCATAG |
| | CACCGAGTCGGTGCAGCCCCTTCGAGT | (Sequence Number: 1665)] + Seq. Spec. |
| | ATCCACAGTACTACCTGGCTTCATAGAA | 3′ Motif [AAGGGG (Sequence |
| | GGGGTTTTTTT (SEQ ID NO: 189) | Number: 1778)], and transcription |
| | | adaptations |
| 190 | GCTCAGCCAGGTAGTACTGTGTTTAAGA | pegRNA*1 (GGG-to-GGA PAM |
| | GCTAGAAATAGCAAGTTTAAATAAGGC | silencing edit); contains gRNA core |
| | TAGTCCGTTATCAGCGTGAAAACGCGG | SEQ ID NO: 1856, Linker [TCAAAA |
| | CACCGAGTCGGTGCAGCCCCTTCGAGT | (Sequence Number: 1666)] + Seq. Spec. |
| | ATCCACAGTACTACCTGGCTTCAAAAG | 3′ Motif [GAAGGG (Sequence |
| | AAGGGTTTTTTT (SEQ ID NO: 190) | Number: 1779)], and transcription |
| | | adaptations |
| 191 | GCTCAGCCAGGTAGTACTGTGTTTAAGA | pegRNA*1 (GGG-to-GGA PAM |
| | GCTAGAAATAGCAAGTTTAAATAAGGC | silencing edit); contains gRNA core |
| | TAGTCCGTTATCAGCGTGAAAACGCGG | SEQ ID NO: 1856, Linker [CCAAAT |
| | CACCGAGTCGGTGCAGCCCCTTCGAGT | (Sequence Number: 1667)] + Seq. Spec. |
| | ATCCACAGTACTACCTGGCTCCAAATCG | 3′ Motif [CGAAGG (Sequence |
| | AAGGTTTTTTT (SEQ ID NO: 191) | Number: 1780)], and transcription |
| | | adaptations |
| 192 | GCTCAGCCAGGTAGTACTGTGTTTAAGA | pegRNA*1 (GGG-to-GGA PAM |
| | GCTAGAAATAGCAAGTTTAAATAAGGC | silencing edit); contains gRNA core |
| | TAGTCCGTTATCAGCGTGAAAACGCGG | SEQ ID NO: 1856, Linker [CCCCTG |
| | CACCGAGTCGGTGCAGCCCCTTCGAGT | (Sequence Number: 1668)] + Seq. Spec. |
| | ATCCACAGTACTACCTGGCTCCCCTGTC | 3′ Motif [TCGAAG (Sequence Number: |
| | GAAGTTTTTTT (SEQ ID NO: 192) | 1781)], and transcription adaptations |
| 193 | GCTCAGCCAGGTAGTACTGTGTTTAAGA | pegRNA*1 (GGG-to-GGA PAM |
| | GCTAGAAATAGCAAGTTTAAATAAGGC | silencing edit); contains gRNA core |
| | TAGTCCGTTATCAGCGTGAAAACGCGG | SEQ ID NO: 1856, Linker [CTATTC |
| | CACCGAGTCGGTGCAGCCCCTTCGAGT | (Sequence Number: 1669)] + Seq. Spec. |
| | ATCCACAGTACTACCTGGCTCTATTCCT | 3′ Motif [CTCGAA (Sequence Number: |
| | CGAATTTTTTT (SEQ ID NO: 193) | 1782)], and transcription adaptations |
| 194 | GCTCAGCCAGGTAGTACTGTGTTTAAGA | pegRNA*1 (GGG-to-GGA PAM |
| | GCTAGAAATAGCAAGTTTAAATAAGGC | silencing edit); contains gRNA core |
| | TAGTCCGTTATCAGCGTGAAAACGCGG | SEQ ID NO: 1856, Linker [ACTCCC |
| | CACCGAGTCGGTGCAGCCCCTTCGAGT | (Sequence Number: 1670)] + Seq. Spec. |
| | ATCCACAGTACTACCTGGCTACTCCCAC | 3′ Motif [ACTCGA (Sequence Number: |
| | TCGATTTTTTT (SEQ ID NO: 194) | 1783)], and transcription adaptations |
| 195 | GCTCAGCCAGGTAGTACTGTGTTTAAGA | pegRNA*1 (GGG-to-GGA PAM |
| | GCTAGAAATAGCAAGTTTAAATAAGGC | silencing edit); contains gRNA core |
| | TAGTCCGTTATCAGCGTGAAAACGCGG | SEQ ID NO: 1856, Linker [TACTTC |
| | CACCGAGTCGGTGCAGCCCCTTCGAGT | (Sequence Number: 1671)] + Seq. Spec. |
| | ATCCACAGTACTACCTGGCTTACTTCTA | 3′ Motif [TACTCG (Sequence Number: |
| | CTCGTTTTTTT (SEQ ID NO: 195) | 1784)], and transcription adaptations |
| 196 | GCTCAGCCAGGTAGTACTGTGTTTAAGA | pegRNA*1 (GGG-to-GGA PAM |
| | GCTAGAAATAGCAAGTTTAAATAAGGC | silencing edit); contains gRNA core |
| | TAGTCCGTTATCAGCGTGAAAACGCGG | SEQ ID NO: 1856, Linker [CTTGAT |
| | CACCGAGTCGGTGCAGCCCCTTCGAGT | (Sequence Number: 1672)] + Seq. Spec. |
| | ATCCACAGTACTACCTGGCTCTTGATAT | 3′ Motif [ATACTC (Sequence Number: |
| | ACTCTTTTTTT (SEQ ID NO: 196) | 1694)], and transcription adaptations |
| 197 | GCTCAGCCAGGTAGTACTGTGTTTAAGA | pegRNA*1 (GGG-to-GGA PAM |
| | GCTAGAAATAGCAAGTTTAAATAAGGC | silencing edit); contains gRNA core |
| | TAGTCCGTTATCAGCGTGAAAACGCGG | SEQ ID NO: 1856, Linker [CTTCTT |
| | CACCGAGTCGGTGCAGCCCCTTCGAGT | (Sequence Number: 1673)] + Seq. Spec. |
| | ATCCACAGTACTACCTGGCTCTTCTTGA | 3′ Motif [GATACT (Sequence Number: |
| | TACTTTTTTTT (SEQ ID NO: 197) | 1792)], and transcription adaptations |
| 198 | GCTCAGCCAGGTAGTACTGTGTTTAAGA | pegRNA*1 (GGG-to-GGA PAM |
| | GCTAGAAATAGCAAGTTTAAATAAGGC | silencing edit); contains gRNA core |
| | TAGTCCGTTATCAGCGTGAAAACGCGG | SEQ ID NO: 1856, Linker [CACCTC |
| | CACCGAGTCGGTGCAGCCCCTTCGAGT | (Sequence Number: 1674)] + Seq. Spec. |
| | ATCCACAGTACTACCTGGCTCACCTCGG | 3′ Motif [GGATAC (Sequence Number: |
| | ATACTTTTTTT (SEQ ID NO: 198) | 1793)], and transcription adaptations |
| 199 | GCTCAGCCAGGTAGTACTGTGTTTAAGA | pegRNA*1 (GGG-to-GGA PAM |
| | GCTAGAAATAGCAAGTTTAAATAAGGC | silencing edit); contains gRNA core |
| | TAGTCCGTTATCAGCGTGAAAACGCGG | SEQ ID NO: 1856, Linker [CACCCC |
| | CACCGAGTCGGTGCAGCCCCTTCGAGT | (Sequence Number: 1675)] + Seq. Spec. |
| | ATCCACAGTACTACCTGGCTCACCCCTG | 3′ Motif [TGGATA (Sequence Number: |
| | GATATTTTTTT (SEQ ID NO: 199) | 1794)], and transcription adaptations |
| 200 | GCTCAGCCAGGTAGTACTGTGTTTAAGA | pegRNA*1 (GGG-to-GGA PAM |
| | GCTAGAAATAGCAAGTTTAAATAAGGC | silencing edit); contains gRNA core |
| | TAGTCCGTTATCAGCGTGAAAACGCGG | SEQ ID NO: 1856, Linker [TTCTAT |
| | CACCGAGTCGGTGCAGCCCCTTCGAGT | (Sequence Number: 1676)] + Seq. Spec. |
| | ATCCACAGTACTACCTGGCTTTCTATGT | 3′ Motif [GTGGAT (Sequence Number: |
| | GGATTTTTTTT (SEQ ID NO: 200) | 1795)], and transcription adaptations |
| 201 | GCTCAGCCAGGTAGTACTGTGTTTAAGA | pegRNA*1 (GGG-to-GGA PAM |
| | GCTAGAAATAGCAAGTTTAAATAAGGC | silencing edit); contains gRNA core |
| | TAGTCCGTTATCAGCGTGAAAACGCGG | SEQ ID NO: 1856, Linker [CAATTC |
| | CACCGAGTCGGTGCAGCCCCTTCGAGT | (Sequence Number: 1677)] + Seq. Spec. |
| | ATCCACAGTACTACCTGGCTCAATTCTG | 3′ Motif [TGTGGA (Sequence Number: |
| | TGGATTTTTTT (SEQ ID NO: 201) | 1796)], and transcription adaptations |
| 202 | GCTCAGCCAGGTAGTACTGTGTTTAAGA | pegRNA; contains gRNA core SEQ ID |
| | GCTAGAAATAGCAAGTTTAAATAAGGC | NO: 1856, Linker [ATAGTG |
| | TAGTCCGTTATCAGCGTGAAAACGCGG | (Sequence Number: 1649)] + Seq. Spec. |
| | CACCGAGTCGGTGCGCAGCCCCTTCGA | 3′ Motif [GGGGCTGC (Sequence |
| | GTACCCACAGTACTACCTGGATAGTGG | Number: 1797)], and transcription |
| | GGGCTGCTTTTTTT (SEQ ID NO: 202) | adaptations |
| 203 | GCTCAGCCAGGTAGTACTGTGTTTAAGA | pegRNA; contains gRNA core SEQ ID |
| | GCTAGAAATAGCAAGTTTAAATAAGGC | NO: 1856, Linker [AGAAAG |
| | TAGTCCGTTATCAGCGTGAAAACGCGG | (Sequence Number: 1650)] + Seq. Spec. |
| | CACCGAGTCGGTGCGCAGCCCCTTCGA | 3′ Motif [AGGGGCTG (Sequence |
| | GTACCCACAGTACTACCTGGAGAAAGA | Number: 1798)], and transcription |
| | GGGGCTGTTTTTTT (SEQ ID NO: 203) | adaptations |
| 204 | GCTCAGCCAGGTAGTACTGTGTTTAAGA | pegRNA; contains gRNA core SEQ ID |
| | GCTAGAAATAGCAAGTTTAAATAAGGC | NO: 1856, Linker [AAGAAA |
| | TAGTCCGTTATCAGCGTGAAAACGCGG | (Sequence Number: 1678)] + Seq. Spec. |
| | CACCGAGTCGGTGCGCAGCCCCTTCGA | 3′ Motif [AAGGGGCT (Sequence |
| | GTACCCACAGTACTACCTGGAAGAAAA | Number: 1799)], and transcription |
| | AGGGGCTTTTTTTT (SEQ ID NO: 204) | adaptations |
| 205 | GCTCAGCCAGGTAGTACTGTGTTTAAGA | pegRNA; contains gRNA core SEQ ID |
| | GCTAGAAATAGCAAGTTTAAATAAGGC | NO: 1856, Linker [AAGAAT |
| | TAGTCCGTTATCAGCGTGAAAACGCGG | (Sequence Number: 1679)] + Seq. Spec. |
| | CACCGAGTCGGTGCGCAGCCCCTTCGA | 3′ Motif [GAAGGGGC (Sequence |
| | GTACCCACAGTACTACCTGGAAGAATG | Number: 1800)], and transcription |
| | AAGGGGCTTTTTTT (SEQ ID NO: 205) | adaptations |
| 206 | GCTCAGCCAGGTAGTACTGTGTTTAAGA | pegRNA; contains gRNA core SEQ ID |
| | GCTAGAAATAGCAAGTTTAAATAAGGC | NO: 1856, Linker [ATTCAA (Sequence |
| | TAGTCCGTTATCAGCGTGAAAACGCGG | Number: 1653)] + Seq. Spec. 3′ Motif |
| | CACCGAGTCGGTGCGCAGCCCCTTCGA | [CGAAGGGG (Sequence Number: |
| | GTACCCACAGTACTACCTGGATTCAACG | 1801)], and transcription adaptations |
| | AAGGGGTTTTTTT (SEQ ID NO: 206) | |
| 207 | GCTCAGCCAGGTAGTACTGTGTTTAAGA | pegRNA; contains gRNA core SEQ ID |
| | GCTAGAAATAGCAAGTTTAAATAAGGC | NO: 1856, Linker [AAATTG |
| | TAGTCCGTTATCAGCGTGAAAACGCGG | (Sequence Number: 1680)] + Seq. Spec. |
| | CACCGAGTCGGTGCGCAGCCCCTTCGA | 3′ Motif [TCGAAGGG (Sequence |
| | GTACCCACAGTACTACCTGGAAATTGTC | Number: 1802)], and transcription |
| | GAAGGGTTTTTTT (SEQ ID NO: 207) | adaptations |
| 208 | GCTCAGCCAGGTAGTACTGTGTTTAAGA | pegRNA; contains gRNA core SEQ ID |
| | GCTAGAAATAGCAAGTTTAAATAAGGC | NO: 1856, Linker [ATCCCA (Sequence |
| | TAGTCCGTTATCAGCGTGAAAACGCGG | Number: 1681)] + Seq. Spec. 3′ Motif |
| | CACCGAGTCGGTGCGCAGCCCCTTCGA | [CTCGAAGG (Sequence Number: |
| | GTACCCACAGTACTACCTGGATCCCACT | 1803)], and transcription adaptations |
| | CGAAGGTTTTTTT (SEQ ID NO: 208) | |
| 209 | GCTCAGCCAGGTAGTACTGTGTTTAAGA | pegRNA; contains gRNA core SEQ ID |
| | GCTAGAAATAGCAAGTTTAAATAAGGC | NO: 1856, Linker [ATCCCC (Sequence |
| | TAGTCCGTTATCAGCGTGAAAACGCGG | Number: 1682)] + Seq. Spec. 3′ Motif |
| | CACCGAGTCGGTGCGCAGCCCCTTCGA | [ACTCGAAG (Sequence Number: |
| | GTACCCACAGTACTACCTGGATCCCCAC | 1804)], and transcription adaptations |
| | TCGAAGTTTTTTT (SEQ ID NO: 209) | |
| 210 | GCTCAGCCAGGTAGTACTGTGTTTAAGA | pegRNA; contains gRNA core SEQ ID |
| | GCTAGAAATAGCAAGTTTAAATAAGGC | NO: 1856, Linker [ACCTCC (Sequence |
| | TAGTCCGTTATCAGCGTGAAAACGCGG | Number: 1683)] + Seq. Spec. 3′ Motif |
| | CACCGAGTCGGTGCGCAGCCCCTTCGA | [TACTCGAA (Sequence Number: |
| | GTACCCACAGTACTACCTGGACCTCCTA | 1805)], and transcription adaptations |
| | CTCGAATTTTTTT (SEQ ID NO: 210) | |
| 211 | GCTCAGCCAGGTAGTACTGTGTTTAAGA | pegRNA; contains gRNA core SEQ ID |
| | GCTAGAAATAGCAAGTTTAAATAAGGC | NO: 1856, Linker [ATAGAC |
| | TAGTCCGTTATCAGCGTGAAAACGCGG | (Sequence Number: 1684)] + Seq. Spec. |
| | CACCGAGTCGGTGCGCAGCCCCTTCGA | 3′ Motif [GTACTCGA (Sequence |
| | GTACCCACAGTACTACCTGGATAGACG | Number: 1806)], and transcription |
| | TACTCGATTTTTTT (SEQ ID NO: 211) | adaptations |
| 212 | GCTCAGCCAGGTAGTACTGTGTTTAAGA | pegRNA; contains gRNA core SEQ ID |
| | GCTAGAAATAGCAAGTTTAAATAAGGC | NO: 1856, Linker [AAGTTC (Sequence |
| | TAGTCCGTTATCAGCGTGAAAACGCGG | Number: 1685)] + Seq. Spec. 3′ Motif |
| | CACCGAGTCGGTGCGCAGCCCCTTCGA | [GGTACTCG (Sequence Number: |
| | GTACCCACAGTACTACCTGGAAGTTCG | 1807)], and transcription adaptations |
| | GTACTCGTTTTTTT (SEQ ID NO: 212) | |
| 213 | GCTCAGCCAGGTAGTACTGTGTTTAAGA | pegRNA; contains gRNA core SEQ ID |
| | GCTAGAAATAGCAAGTTTAAATAAGGC | NO: 1856, Linker [AGAAAC |
| | TAGTCCGTTATCAGCGTGAAAACGCGG | (Sequence Number: 1686)] + Seq. Spec. |
| | CACCGAGTCGGTGCGCAGCCCCTTCGA | 3′ Motif [GGGTACTC (Sequence |
| | GTACCCACAGTACTACCTGGAGAAACG | Number: 1808)], and transcription |
| | GGTACTCTTTTTTT (SEQ ID NO: 213) | adaptations |
| 214 | GCTCAGCCAGGTAGTACTGTGTTTAAGA | pegRNA; contains gRNA core SEQ ID |
| | GCTAGAAATAGCAAGTTTAAATAAGGC | NO: 1856, Linker [AAAGAA |
| | TAGTCCGTTATCAGCGTGAAAACGCGG | (Sequence Number: 1687)] + Seq. Spec. |
| | CACCGAGTCGGTGCGCAGCCCCTTCGA | 3′ Motif [TGGGTACT (Sequence |
| | GTACCCACAGTACTACCTGGAAAGAAT | Number: 1809)], and transcription |
| | GGGTACTTTTTTTT (SEQ ID NO: 214) | adaptations |
| 215 | GCTCAGCCAGGTAGTACTGTGTTTAAGA | pegRNA; contains gRNA core SEQ ID |
| | GCTAGAAATAGCAAGTTTAAATAAGGC | NO: 1856, Linker [AAATAA |
| | TAGTCCGTTATCAGCGTGAAAACGCGG | (Sequence Number: 1688)] + Seq. Spec. |
| | CACCGAGTCGGTGCGCAGCCCCTTCGA | 3′ Motif [GTGGGTAC (Sequence |
| | GTACCCACAGTACTACCTGGAAATAAG | Number: 1810)], and transcription |
| | TGGGTACTTTTTTT (SEQ ID NO: 215) | adaptations |
| 216 | GCTCAGCCAGGTAGTACTGTGTTTAAGA | pegRNA; contains gRNA core SEQ ID |
| | GCTAGAAATAGCAAGTTTAAATAAGGC | NO: 1856, Linker [AAAAAA |
| | TAGTCCGTTATCAGCGTGAAAACGCGG | (Sequence Number: 1661)] + Seq. Spec. |
| | CACCGAGTCGGTGCGCAGCCCCTTCGA | 3′ Motif [TGTGGGTA (Sequence |
| | GTACCCACAGTACTACCTGGAAAAAAT | Number: 1811)], and transcription |
| | GTGGGTATTTTTTT (SEQ ID NO: 216) | adaptations |
| 217 | GCTCAGCCAGGTAGTACTGTGTTTAAGA | pegRNA*1 (GGG-to-GGA PAM |
| | GCTAGAAATAGCAAGTTTAAATAAGGC | silencing edit); contains gRNA core |
| | TAGTCCGTTATCAGCGTGAAAACGCGG | SEQ ID NO: 1856, Linker [TCATAG |
| | CACCGAGTCGGTGCAGCCCCTTCGAGT | (Sequence Number: 1665)] + Seq. Spec. |
| | ATCCACAGTACTACCTGGCTTCATAGAA | 3′ Motif [AAGGGGCT (Sequence |
| | GGGGCTTTTTTTT (SEQ ID NO: 217) | Number: 1799)], and transcription |
| | | adaptations |
| 218 | GCTCAGCCAGGTAGTACTGTGTTTAAGA | pegRNA*1 (GGG-to-GGA PAM |
| | GCTAGAAATAGCAAGTTTAAATAAGGC | silencing edit); contains gRNA core |
| | TAGTCCGTTATCAGCGTGAAAACGCGG | SEQ ID NO: 1856, Linker [TCAAGT |
| | CACCGAGTCGGTGCAGCCCCTTCGAGT | (Sequence Number: 1689)] + Seq. Spec. |
| | ATCCACAGTACTACCTGGCTTCAAGTGA | 3′ Motif [GAAGGGGC (Sequence |
| | AGGGGCTTTTTTT (SEQ ID NO: 218) | Number: 1800)], and transcription |
| | | adaptations |
| 219 | GCTCAGCCAGGTAGTACTGTGTTTAAGA | pegRNA*1 (GGG-to-GGA PAM |
| | GCTAGAAATAGCAAGTTTAAATAAGGC | silencing edit); contains gRNA core |
| | TAGTCCGTTATCAGCGTGAAAACGCGG | SEQ ID NO: 1856, Linker [TTCTAT |
| | CACCGAGTCGGTGCAGCCCCTTCGAGT | (Sequence Number: 1676)] + Seq. Spec. |
| | ATCCACAGTACTACCTGGCTTTCTATCG | 3′ Motif [CGAAGGGG (Sequence |
| | AAGGGGTTTTTTT (SEQ ID NO: 219) | Number: 1801)], and transcription |
| | | adaptations |
| 220 | GCTCAGCCAGGTAGTACTGTGTTTAAGA | pegRNA*1 (GGG-to-GGA PAM |
| | GCTAGAAATAGCAAGTTTAAATAAGGC | silencing edit); contains gRNA core |
| | TAGTCCGTTATCAGCGTGAAAACGCGG | SEQ ID NO: 1856, Linker [AAAATT |
| | CACCGAGTCGGTGCAGCCCCTTCGAGT | (Sequence Number: 1690)] + Seq. Spec. |
| | ATCCACAGTACTACCTGGCTAAAATTTC | 3′ Motif [TCGAAGGG (Sequence |
| | GAAGGGTTTTTTT (SEQ ID NO: 220) | Number: 1802)], and transcription |
| | | adaptations |
| 221 | GCTCAGCCAGGTAGTACTGTGTTTAAGA | pegRNA*1 (GGG-to-GGA PAM |
| | GCTAGAAATAGCAAGTTTAAATAAGGC | silencing edit); contains gRNA core |
| | TAGTCCGTTATCAGCGTGAAAACGCGG | SEQ ID NO: 1856, Linker [ACTACT |
| | CACCGAGTCGGTGCAGCCCCTTCGAGT | (Sequence Number: 1691)] + Seq. Spec. |
| | ATCCACAGTACTACCTGGCTACTACTCT | 3′ Motif [CTCGAAGG (Sequence |
| | CGAAGGTTTTTTT (SEQ ID NO: 221) | Number: 1803)], and transcription |
| | | adaptations |
| 222 | GCTCAGCCAGGTAGTACTGTGTTTAAGA | pegRNA*1 (GGG-to-GGA PAM |
| | GCTAGAAATAGCAAGTTTAAATAAGGC | silencing edit); contains gRNA core |
| | TAGTCCGTTATCAGCGTGAAAACGCGG | SEQ ID NO: 1856, Linker [ACTATA |
| | CACCGAGTCGGTGCAGCCCCTTCGAGT | (Sequence Number: 1692)] + Seq. Spec. |
| | ATCCACAGTACTACCTGGCTACTATAAC | 3′ Motif [ACTCGAAG (Sequence |
| | TCGAAGTTTTTTT (SEQ ID NO: 222) | Number: 1804)], and transcription |
| | | adaptations |
| 223 | GCTCAGCCAGGTAGTACTGTGTTTAAGA | pegRNA*1 (GGG-to-GGA PAM |
| | GCTAGAAATAGCAAGTTTAAATAAGGC | silencing edit); contains gRNA core |
| | TAGTCCGTTATCAGCGTGAAAACGCGG | SEQ ID NO: 1856, Linker [ACACTG |
| | CACCGAGTCGGTGCAGCCCCTTCGAGT | (Sequence Number: 1693)] + Seq. Spec. |
| | ATCCACAGTACTACCTGGCTACACTGTA | 3′ Motif [TACTCGAA (Sequence |
| | CTCGAATTTTTTT (SEQ ID NO: 223) | Number: 1805)], and transcription |
| | | adaptations |
| 224 | GCTCAGCCAGGTAGTACTGTGTTTAAGA | pegRNA*1 (GGG-to-GGA PAM |
| | GCTAGAAATAGCAAGTTTAAATAAGGC | silencing edit); contains gRNA core |
| | TAGTCCGTTATCAGCGTGAAAACGCGG | SEQ ID NO: 1856, Linker [ATACTC |
| | CACCGAGTCGGTGCAGCCCCTTCGAGT | (Sequence Number: 1694)] + Seq. Spec. |
| | ATCCACAGTACTACCTGGCTATACTCAT | 3′ Motif [ATACTCGA (Sequence |
| | ACTCGATTTTTTT (SEQ ID NO: 224) | Number: 1812)], and transcription |
| | | adaptations |
| 225 | GCTCAGCCAGGTAGTACTGTGTTTAAGA | pegRNA*1 (GGG-to-GGA PAM |
| | GCTAGAAATAGCAAGTTTAAATAAGGC | silencing edit); contains gRNA core |
| | TAGTCCGTTATCAGCGTGAAAACGCGG | SEQ ID NO: 1856, Linker [TCTCCA |
| | CACCGAGTCGGTGCAGCCCCTTCGAGT | (Sequence Number: 1695)] + Seq. Spec. |
| | ATCCACAGTACTACCTGGCTTCTCCAGA | 3′ Motif [GATACTCG (Sequence |
| | TACTCGTTTTTTT (SEQ ID NO: 225) | Number: 1813)], and transcription |
| | | adaptations |
| 226 | GCTCAGCCAGGTAGTACTGTGTTTAAGA | pegRNA*1 (GGG-to-GGA PAM |
| | GCTAGAAATAGCAAGTTTAAATAAGGC | silencing edit); contains gRNA core |
| | TAGTCCGTTATCAGCGTGAAAACGCGG | SEQ ID NO: 1856, Linker [AATATT |
| | CACCGAGTCGGTGCAGCCCCTTCGAGT | (Sequence Number: 1696)] + Seq. Spec. |
| | ATCCACAGTACTACCTGGCTAATATTGG | 3′ Motif [GGATACTC (Sequence |
| | ATACTCTTTTTTT (SEQ ID NO: 226) | Number: 1814)], and transcription |
| | | adaptations |
| 227 | GCTCAGCCAGGTAGTACTGTGTTTAAGA | pegRNA*1 (GGG-to-GGA PAM |
| | GCTAGAAATAGCAAGTTTAAATAAGGC | silencing edit); contains gRNA core |
| | TAGTCCGTTATCAGCGTGAAAACGCGG | SEQ ID NO: 1856, Linker [CACCCC |
| | CACCGAGTCGGTGCAGCCCCTTCGAGT | (Sequence Number: 1675)] + Seq. Spec. |
| | ATCCACAGTACTACCTGGCTCACCCCTG | 3′ Motif [TGGATACT (Sequence |
| | GATACTTTTTTTT (SEQ ID NO: 227) | Number: 1815)], and transcription |
| | | adaptations |
| 228 | GCTCAGCCAGGTAGTACTGTGTTTAAGA | pegRNA*1 (GGG-to-GGA PAM |
| | GCTAGAAATAGCAAGTTTAAATAAGGC | silencing edit); contains gRNA core |
| | TAGTCCGTTATCAGCGTGAAAACGCGG | SEQ ID NO: 1856, Linker [TTCTAT |
| | CACCGAGTCGGTGCAGCCCCTTCGAGT | (Sequence Number: 1676)] + Seq. Spec. |
| | ATCCACAGTACTACCTGGCTTTCTATGT | 3′ Motif [GTGGATAC (Sequence |
| | GGATACTTTTTTT (SEQ ID NO: 228) | Number: 1816)], and transcription |
| | | adaptations |
| 229 | GCTCAGCCAGGTAGTACTGTGTTTAAGA | pegRNA*1 (GGG-to-GGA PAM |
| | GCTAGAAATAGCAAGTTTAAATAAGGC | silencing edit); contains gRNA core |
| | TAGTCCGTTATCAGCGTGAAAACGCGG | SEQ ID NO: 1856, Linker [CAAATC |
| | CACCGAGTCGGTGCAGCCCCTTCGAGT | (Sequence Number: 1697)] + Seq. Spec. |
| | ATCCACAGTACTACCTGGCTCAAATCTG | 3′ Motif [TGTGGATA (Sequence |
| | TGGATATTTTTTT (SEQ ID NO: 229) | Number: 1817)], and transcription |
| | | adaptations |
| 230 | GCTCAGCCAGGTAGTACTGTGTTTAAGA | pegRNA*1 (GGG-to-GGA PAM |
| | GCTAGAAATAGCAAGTTTAAATAAGGC | silencing edit); contains gRNA core |
| | TAGTCCGTTATCAGCGTGAAAACGCGG | SEQ ID NO: 1856, Linker [AAAATA |
| | CACCGAGTCGGTGCAGCCCCTTCGAGT | (Sequence Number: 1698)] + Seq. Spec. |
| | ATCCACAGTACTACCTGGCTGAAAAAT | 3′ Motif [GGGGCT (Sequence Number: |
| | AGGGGCTTTTTTTT (SEQ ID NO: 230) | 1776)], and transcription adaptations |
| 231 | GCTCAGCCAGGTAGTACTGTGTTTAAGA | pegRNA*1 (GGG-to-GGA PAM |
| | GCTAGAAATAGCAAGTTTAAATAAGGC | silencing edit); contains gRNA core |
| | TAGTCCGTTATCAGCGTGAAAACGCGG | SEQ ID NO: 1856, Linker [AATAAC |
| | CACCGAGTCGGTGCAGCCCCTTCGAGT | (Sequence Number: 1699)] + Seq. Spec. |
| | ATCCACAGTACTACCTGGCTGAAATAA | 3′ Motif [AGGGGC (Sequence |
| | CAGGGGCTTTTTTT (SEQ ID NO: 231) | Number: 1777)], and transcription |
| | | adaptations |
| 232 | GCTCAGCCAGGTAGTACTGTGTTTAAGA | pegRNA*1 (GGG-to-GGA PAM |
| | GCTAGAAATAGCAAGTTTAAATAAGGC | silencing edit); contains gRNA core |
| | TAGTCCGTTATCAGCGTGAAAACGCGG | SEQ ID NO: 1856, Linker [ATTAAC |
| | CACCGAGTCGGTGCAGCCCCTTCGAGT | (Sequence Number: 1700)] + Seq. Spec. |
| | ATCCACAGTACTACCTGGCTGAATTAAC | 3′ Motif [AAGGGG (Sequence |
| | AAGGGGTTTTTTT (SEQ ID NO: 232) | Number: 1778)], and transcription |
| | | adaptations |
| 233 | GCTCAGCCAGGTAGTACTGTGTTTAAGA | pegRNA*1 (GGG-to-GGA PAM |
| | GCTAGAAATAGCAAGTTTAAATAAGGC | silencing edit); contains gRNA core |
| | TAGTCCGTTATCAGCGTGAAAACGCGG | SEQ ID NO: 1856, Linker [CTGTTA |
| | CACCGAGTCGGTGCAGCCCCTTCGAGT | (Sequence Number: 1701)] + Seq. Spec. |
| | ATCCACAGTACTACCTGGCTGACTGTTA | 3′ Motif [GAAGGG (Sequence |
| | GAAGGGTTTTTTT (SEQ ID NO: 233) | Number: 1779)], and transcription |
| | | adaptations |
| 234 | GCTCAGCCAGGTAGTACTGTGTTTAAGA | pegRNA*1 (GGG-to-GGA PAM |
| | GCTAGAAATAGCAAGTTTAAATAAGGC | silencing edit); contains gRNA core |
| | TAGTCCGTTATCAGCGTGAAAACGCGG | SEQ ID NO: 1856, Linker [CAAAAT |
| | CACCGAGTCGGTGCAGCCCCTTCGAGT | (Sequence Number: 1702)] + Seq. Spec. |
| | ATCCACAGTACTACCTGGCTGACAAAA | 3′ Motif [CGAAGG (Sequence |
| | TCGAAGGTTTTTTT (SEQ ID NO: 234) | Number: 1780)], and transcription |
| | | adaptations |
| 235 | GCTCAGCCAGGTAGTACTGTGTTTAAGA | pegRNA*1 (GGG-to-GGA PAM |
| | GCTAGAAATAGCAAGTTTAAATAAGGC | silencing edit); contains gRNA core |
| | TAGTCCGTTATCAGCGTGAAAACGCGG | SEQ ID NO: 1856, Linker [CCCCCC |
| | CACCGAGTCGGTGCAGCCCCTTCGAGT | (Sequence Number: 1703)] + Seq. Spec. |
| | ATCCACAGTACTACCTGGCTGACCCCCC | 3′ Motif [TCGAAG (Sequence Number: |
| | TCGAAGTTTTTTT (SEQ ID NO: 235) | 1781)], and transcription adaptations |
| 236 | GCTCAGCCAGGTAGTACTGTGTTTAAGA | pegRNA*1 (GGG-to-GGA PAM |
| | GCTAGAAATAGCAAGTTTAAATAAGGC | silencing edit); contains gRNA core |
| | TAGTCCGTTATCAGCGTGAAAACGCGG | SEQ ID NO: 1856, Linker [AACCGA |
| | CACCGAGTCGGTGCAGCCCCTTCGAGT | (Sequence Number: 1704)] + Seq. Spec. |
| | ATCCACAGTACTACCTGGCTGAAACCG | 3′ Motif [CTCGAA (Sequence Number: |
| | ACTCGAATTTTTTT (SEQ ID NO: 236) | 1782)], and transcription adaptations |
| 237 | GCTCAGCCAGGTAGTACTGTGTTTAAGA | pegRNA*1 (GGG-to-GGA PAM |
| | GCTAGAAATAGCAAGTTTAAATAAGGC | silencing edit); contains gRNA core |
| | TAGTCCGTTATCAGCGTGAAAACGCGG | SEQ ID NO: 1856, Linker [ACCCCG |
| | CACCGAGTCGGTGCAGCCCCTTCGAGT | (Sequence Number: 1705)] + Seq. Spec. |
| | ATCCACAGTACTACCTGGCTGAACCCCG | 3′ Motif [ACTCGA (Sequence Number: |
| | ACTCGATTTTTTT (SEQ ID NO: 237) | 1783)], and transcription adaptations |
| 238 | GCTCAGCCAGGTAGTACTGTGTTTAAGA | pegRNA*1 (GGG-to-GGA PAM |
| | GCTAGAAATAGCAAGTTTAAATAAGGC | silencing edit); contains gRNA core |
| | TAGTCCGTTATCAGCGTGAAAACGCGG | SEQ ID NO: 1856, Linker [CAAAAG |
| | CACCGAGTCGGTGCAGCCCCTTCGAGT | (Sequence Number: 1706)] + Seq. Spec. |
| | ATCCACAGTACTACCTGGCTGACAAAA | 3′ Motif [TACTCG (Sequence Number: |
| | GTACTCGTTTTTTT (SEQ ID NO: 238) | 1784)], and transcription adaptations |
| 239 | GCTCAGCCAGGTAGTACTGTGTTTAAGA | pegRNA*1 (GGG-to-GGA PAM |
| | GCTAGAAATAGCAAGTTTAAATAAGGC | silencing edit); contains gRNA core |
| | TAGTCCGTTATCAGCGTGAAAACGCGG | SEQ ID NO: 1856, Linker [AAAACG |
| | CACCGAGTCGGTGCAGCCCCTTCGAGT | (Sequence Number: 1707)] + Seq. Spec. |
| | ATCCACAGTACTACCTGGCTGAAAAAC | 3′ Motif [ATACTC (Sequence Number: |
| | GATACTCTTTTTTT (SEQ ID NO: 239) | 1694)], and transcription adaptations |
| 240 | GCTCAGCCAGGTAGTACTGTGTTTAAGA | pegRNA*1 (GGG-to-GGA PAM |
| | GCTAGAAATAGCAAGTTTAAATAAGGC | silencing edit); contains gRNA core |
| | TAGTCCGTTATCAGCGTGAAAACGCGG | SEQ ID NO: 1856, Linker [AACCCT |
| | CACCGAGTCGGTGCAGCCCCTTCGAGT | (Sequence Number: 1708)] + Seq. Spec. |
| | ATCCACAGTACTACCTGGCTGAAACCCT | 3′ Motif [GATACT (Sequence Number: |
| | GATACTTTTTTTT (SEQ ID NO: 240) | 1792)], and transcription adaptations |
| 241 | GCTCAGCCAGGTAGTACTGTGTTTAAGA | pegRNA*1 (GGG-to-GGA PAM |
| | GCTAGAAATAGCAAGTTTAAATAAGGC | silencing edit); contains gRNA core |
| | TAGTCCGTTATCAGCGTGAAAACGCGG | SEQ ID NO: 1856, Linker [AAAAAT |
| | CACCGAGTCGGTGCAGCCCCTTCGAGT | (Sequence Number: 1709)] + Seq. Spec. |
| | ATCCACAGTACTACCTGGCTGAAAAAA | 3′ Motif [GGATAC (Sequence Number: |
| | TGGATACTTTTTTT (SEQ ID NO: 241) | 1793)], and transcription adaptations |
| 242 | GCTCAGCCAGGTAGTACTGTGTTTAAGA | pegRNA*1 (GGG-to-GGA PAM |
| | GCTAGAAATAGCAAGTTTAAATAAGGC | silencing edit); contains gRNA core |
| | TAGTCCGTTATCAGCGTGAAAACGCGG | SEQ ID NO: 1856, Linker [AAAAAA |
| | CACCGAGTCGGTGCAGCCCCTTCGAGT | (Sequence Number: 1661)] + Seq. Spec. |
| | ATCCACAGTACTACCTGGCTGAAAAAA | 3′ Motif [TGGATA (Sequence Number: |
| | ATGGATATTTTTTT (SEQ ID NO: 242) | 1794)], and transcription adaptations |
| 243 | GCTCAGCCAGGTAGTACTGTGTTTAAGA | pegRNA*1 (GGG-to-GGA PAM |
| | GCTAGAAATAGCAAGTTTAAATAAGGC | silencing edit); contains gRNA core |
| | TAGTCCGTTATCAGCGTGAAAACGCGG | SEQ ID NO: 1856, Linker [ATAAAA |
| | CACCGAGTCGGTGCAGCCCCTTCGAGT | (Sequence Number: 1710)] + Seq. Spec. |
| | ATCCACAGTACTACCTGGCTGAATAAA | 3′ Motif [GTGGAT (Sequence Number: |
| | AGTGGATTTTTTTT (SEQ ID NO: 243) | 1795)], and transcription adaptations |
| 244 | GCTCAGCCAGGTAGTACTGTGTTTAAGA | pegRNA*1 (GGG-to-GGA PAM |
| | GCTAGAAATAGCAAGTTTAAATAAGGC | silencing edit); contains gRNA core |
| | TAGTCCGTTATCAGCGTGAAAACGCGG | SEQ ID NO: 1856, Linker [ATCATC |
| | CACCGAGTCGGTGCAGCCCCTTCGAGT | (Sequence Number: 1711)] + Seq. Spec. |
| | ATCCACAGTACTACCTGGCTGAATCATC | 3′ Motif [TGTGGA (Sequence Number: |
| | TGTGGATTTTTTT (SEQ ID NO: 244) | 1796)], and transcription adaptations |
| 245 | GCTCAGCCAGGTAGTACTGTGTTTAAGA | pegRNA*1 (GGG-to-GGA PAM |
| | GCTAGAAATAGCAAGTTTAAATAAGGC | silencing edit); contains gRNA core |
| | TAGTCCGTTATCAGCGTGAAAACGCGG | SEQ ID NO: 1856, Linker [ATTAAC |
| | CACCGAGTCGGTGCAGCCCCTTCGAGT | (Sequence Number: 1700)] + Seq. Spec. |
| | ATCCACAGTACTACCTGGCTGAATTAAC | 3′ Motif [AAGGGGCT (Sequence |
| | AAGGGGCTTTTTTTT (SEQ ID NO: 245) | Number: 1799)], and transcription |
| | | adaptations |
| 246 | GCTCAGCCAGGTAGTACTGTGTTTAAGA | pegRNA*1 (GGG-to-GGA PAM |
| | GCTAGAAATAGCAAGTTTAAATAAGGC | silencing edit); contains gRNA core |
| | TAGTCCGTTATCAGCGTGAAAACGCGG | SEQ ID NO: 1856, Linker [CTGTTA |
| | CACCGAGTCGGTGCAGCCCCTTCGAGT | (Sequence Number: 1701)] + Seq. Spec. |
| | ATCCACAGTACTACCTGGCTGACTGTTA | 3′ Motif [GAAGGGGC (Sequence |
| | GAAGGGGCTTTTTTT (SEQ ID NO: 246) | Number: 1800)], and transcription |
| | | adaptations |
| 247 | GCTCAGCCAGGTAGTACTGTGTTTAAGA | pegRNA*1 (GGG-to-GGA PAM |
| | GCTAGAAATAGCAAGTTTAAATAAGGC | silencing edit); contains gRNA core |
| | TAGTCCGTTATCAGCGTGAAAACGCGG | SEQ ID NO: 1856, Linker [ATCTAT |
| | CACCGAGTCGGTGCAGCCCCTTCGAGT | (Sequence Number: 1712)] + Seq. Spec. |
| | ATCCACAGTACTACCTGGCTGAATCTAT | 3′ Motif [CGAAGGGG (Sequence |
| | CGAAGGGGTTTTTTT (SEQ ID NO: 247) | Number: 1801)], and transcription |
| | | adaptations |
| 248 | GCTCAGCCAGGTAGTACTGTGTTTAAGA | pegRNA*1 (GGG-to-GGA PAM |
| | GCTAGAAATAGCAAGTTTAAATAAGGC | silencing edit); contains gRNA core |
| | TAGTCCGTTATCAGCGTGAAAACGCGG | SEQ ID NO: 1856, Linker [ACACTT |
| | CACCGAGTCGGTGCAGCCCCTTCGAGT | (Sequence Number: 1713)] + Seq. Spec. |
| | ATCCACAGTACTACCTGGCTGAACACTT | 3′ Motif [TCGAAGGG (Sequence |
| | TCGAAGGGTTTTTTT (SEQ ID NO: 248) | Number: 1802)], and transcription |
| | | adaptations |
| 249 | GCTCAGCCAGGTAGTACTGTGTTTAAGA | pegRNA*1 (GGG-to-GGA PAM |
| | GCTAGAAATAGCAAGTTTAAATAAGGC | silencing edit); contains gRNA core |
| | TAGTCCGTTATCAGCGTGAAAACGCGG | SEQ ID NO: 1856, Linker [ACTCGG |
| | CACCGAGTCGGTGCAGCCCCTTCGAGT | (Sequence Number: 1714)] + Seq. Spec. |
| | ATCCACAGTACTACCTGGCTGAACTCGG | 3′ Motif [CTCGAAGG (Sequence |
| | CTCGAAGGTTTTTTT (SEQ ID NO: 249) | Number: 1803)], and transcription |
| | | adaptations |
| 250 | GCTCAGCCAGGTAGTACTGTGTTTAAGA | pegRNA*1 (GGG-to-GGA PAM |
| | GCTAGAAATAGCAAGTTTAAATAAGGC | silencing edit); contains gRNA core |
| | TAGTCCGTTATCAGCGTGAAAACGCGG | SEQ ID NO: 1856, Linker [ACCCCG |
| | CACCGAGTCGGTGCAGCCCCTTCGAGT | (Sequence Number: 1705)] + Seq. Spec. |
| | ATCCACAGTACTACCTGGCTGAACCCCG | 3′ Motif [ACTCGAAG (Sequence |
| | ACTCGAAGTTTTTTT (SEQ ID NO: 250) | Number: 1804)], and transcription |
| | | adaptations |
| 251 | GCTCAGCCAGGTAGTACTGTGTTTAAGA | pegRNA*1 (GGG-to-GGA PAM |
| | GCTAGAAATAGCAAGTTTAAATAAGGC | silencing edit); contains gRNA core |
| | TAGTCCGTTATCAGCGTGAAAACGCGG | SEQ ID NO: 1856, Linker [CCCAAG |
| | CACCGAGTCGGTGCAGCCCCTTCGAGT | (Sequence Number: 1715)] + Seq. Spec. |
| | ATCCACAGTACTACCTGGCTGACCCAA | 3′ Motif [TACTCGAA (Sequence |
| | GTACTCGAATTTTTTT (SEQ ID NO: 251) | Number: 1805)], and transcription |
| | | adaptations |
| 252 | GCTCAGCCAGGTAGTACTGTGTTTAAGA | pegRNA*1 (GGG-to-GGA PAM |
| | GCTAGAAATAGCAAGTTTAAATAAGGC | silencing edit); contains gRNA core |
| | TAGTCCGTTATCAGCGTGAAAACGCGG | SEQ ID NO: 1856, Linker [AAAAAG |
| | CACCGAGTCGGTGCAGCCCCTTCGAGT | (Sequence Number: 1716)] + Seq. Spec. |
| | ATCCACAGTACTACCTGGCTGAAAAAA | 3′ Motif [ATACTCGA (Sequence |
| | GATACTCGATTTTTTT (SEQ ID NO: 252) | Number: 1812)], and transcription |
| | | adaptations |
| 253 | GCTCAGCCAGGTAGTACTGTGTTTAAGA | pegRNA*1 (GGG-to-GGA PAM |
| | GCTAGAAATAGCAAGTTTAAATAAGGC | silencing edit); contains gRNA core |
| | TAGTCCGTTATCAGCGTGAAAACGCGG | SEQ ID NO: 1856, Linker [AAAAAA |
| | CACCGAGTCGGTGCAGCCCCTTCGAGT | (Sequence Number: 1661)] + Seq. Spec. |
| | ATCCACAGTACTACCTGGCTGAAAAAA | 3′ Motif [GATACTCG (Sequence |
| | AGATACTCGTTTTTTT (SEQ ID NO: 253) | Number: 1813)], and transcription |
| | | adaptations |
| 254 | GCTCAGCCAGGTAGTACTGTGTTTAAGA | pegRNA*1 (GGG-to-GGA PAM |
| | GCTAGAAATAGCAAGTTTAAATAAGGC | silencing edit); contains gRNA core |
| | TAGTCCGTTATCAGCGTGAAAACGCGG | SEQ ID NO: 1856, Linker [AAAAAT |
| | CACCGAGTCGGTGCAGCCCCTTCGAGT | (Sequence Number: 1709)] + Seq. Spec. |
| | ATCCACAGTACTACCTGGCTGAAAAAA | 3′ Motif [GGATACTC (Sequence |
| | TGGATACTCTTTTTTT (SEQ ID NO: 254) | Number: 1814)], and transcription |
| | | adaptations |
| 255 | GCTCAGCCAGGTAGTACTGTGTTTAAGA | pegRNA*1 (GGG-to-GGA PAM |
| | GCTAGAAATAGCAAGTTTAAATAAGGC | silencing edit); contains gRNA core |
| | TAGTCCGTTATCAGCGTGAAAACGCGG | SEQ ID NO: 1856, Linker [AAAAAA |
| | CACCGAGTCGGTGCAGCCCCTTCGAGT | (Sequence Number: 1661)] + Seq. Spec. |
| | ATCCACAGTACTACCTGGCTGAAAAAA | 3′ Motif [TGGATACT (Sequence |
| | ATGGATACTTTTTTTT (SEQ ID NO: 255) | Number: 1815)], and transcription |
| | | adaptations |
| 256 | GCTCAGCCAGGTAGTACTGTGTTTAAGA | pegRNA*1 (GGG-to-GGA PAM |
| | GCTAGAAATAGCAAGTTTAAATAAGGC | silencing edit); contains gRNA core |
| | TAGTCCGTTATCAGCGTGAAAACGCGG | SEQ ID NO: 1856, Linker [AAATAA |
| | CACCGAGTCGGTGCAGCCCCTTCGAGT | (Sequence Number: 1688)] + Seq. Spec. |
| | ATCCACAGTACTACCTGGCTGAAAATA | 3′ Motif [GTGGATAC (Sequence |
| | AGTGGATACTTTTTTT (SEQ ID NO: 256) | Number: 1816)], and transcription |
| | | adaptations |
| 257 | GCTCAGCCAGGTAGTACTGTGTTTAAGA | pegRNA*1 (GGG-to-GGA PAM |
| | GCTAGAAATAGCAAGTTTAAATAAGGC | silencing edit); contains gRNA core |
| | TAGTCCGTTATCAGCGTGAAAACGCGG | SEQ ID NO: 1856, Linker [ATCATT |
| | CACCGAGTCGGTGCAGCCCCTTCGAGT | (Sequence Number: 1717)] + Seq. Spec. |
| | ATCCACAGTACTACCTGGCTGAATCATT | 3′ Motif [TGTGGATA (Sequence |
| | TGTGGATATTTTTTT (SEQ ID NO: 257) | Number: 1817)], and transcription |
| | | adaptations |
| 258 | GCTCAGCCAGGTAGTACTGTGTTTAAGA | pegRNA*1 (GGG-to-GGA PAM |
| | GCTAGAAATAGCAAGTTTAAATAAGGC | silencing edit); contains gRNA core |
| | TAGTCCGTTATCAGCGTGAAAACGCGG | SEQ ID NO: 1856, Linker [CAACAC |
| | CACCGAGTCGGTGCGCAGCCCCTTCGA | (Sequence Number: 1718)] + Seq. Spec. |
| | GTATCCACAGTACTACCTGGCTGACAAC | 3′ Motif [GGCTGC (Sequence Number: |
| | ACGGCTGCTTTTTTT (SEQ ID NO: 258) | 1774)], and transcription adaptations |
| 259 | GCTCAGCCAGGTAGTACTGTGTTTAAGA | pegRNA*1 (GGG-to-GGA PAM |
| | GCTAGAAATAGCAAGTTTAAATAAGGC | silencing edit); contains gRNA core |
| | TAGTCCGTTATCAGCGTGAAAACGCGG | SEQ ID NO: 1856, Linker [ACACCC |
| | CACCGAGTCGGTGCGCAGCCCCTTCGA | (Sequence Number: 1719)] + Seq. Spec. |
| | GTATCCACAGTACTACCTGGCTGAACAC | 3′ Motif [GGGCTG (Sequence Number: |
| | CCGGGCTGTTTTTTT (SEQ ID NO: 259) | 1775)], and transcription adaptations |
| 260 | GCTCAGCCAGGTAGTACTGTGTTTAAGA | pegRNA*1 (GGG-to-GGA PAM |
| | GCTAGAAATAGCAAGTTTAAATAAGGC | silencing edit); contains gRNA core |
| | TAGTCCGTTATCAGCGTGAAAACGCGG | SEQ ID NO: 1856, Linker [AAAATA |
| | CACCGAGTCGGTGCGCAGCCCCTTCGA | (Sequence Number: 1698)] + Seq. Spec. |
| | GTATCCACAGTACTACCTGGCTGAAAA | 3′ Motif [GGGGCT (Sequence Number: |
| | ATAGGGGCTTTTTTTT (SEQ ID NO: 260) | 1776)], and transcription adaptations |
| 261 | GCTCAGCCAGGTAGTACTGTGTTTAAGA | pegRNA*1 (GGG-to-GGA PAM |
| | GCTAGAAATAGCAAGTTTAAATAAGGC | silencing edit); contains gRNA core |
| | TAGTCCGTTATCAGCGTGAAAACGCGG | SEQ ID NO: 1856, Linker [AATAAC |
| | CACCGAGTCGGTGCGCAGCCCCTTCGA | (Sequence Number: 1699)] + Seq. Spec. |
| | GTATCCACAGTACTACCTGGCTGAAATA | 3′ Motif [AGGGGC (Sequence |
| | ACAGGGGCTTTTTTT (SEQ ID NO: 261) | Number: 1777)], and transcription |
| | | adaptations |
| 262 | GCTCAGCCAGGTAGTACTGTGTTTAAGA | pegRNA*1 (GGG-to-GGA PAM |
| | GCTAGAAATAGCAAGTTTAAATAAGGC | silencing edit); contains gRNA core |
| | TAGTCCGTTATCAGCGTGAAAACGCGG | SEQ ID NO: 1856, Linker [ATTAAC |
| | CACCGAGTCGGTGCGCAGCCCCTTCGA | (Sequence Number: 1700)] + Seq. Spec. |
| | GTATCCACAGTACTACCTGGCTGAATTA | 3′ Motif [AAGGGG (Sequence |
| | ACAAGGGGTTTTTTT (SEQ ID NO: 262) | Number: 1778)], and transcription |
| | | adaptations |
| 263 | GCTCAGCCAGGTAGTACTGTGTTTAAGA | pegRNA*1 (GGG-to-GGA PAM |
| | GCTAGAAATAGCAAGTTTAAATAAGGC | silencing edit); contains gRNA core |
| | TAGTCCGTTATCAGCGTGAAAACGCGG | SEQ ID NO: 1856, Linker [CTGTTA |
| | CACCGAGTCGGTGCGCAGCCCCTTCGA | (Sequence Number: 1701)] + Seq. Spec. |
| | GTATCCACAGTACTACCTGGCTGACTGT | 3′ Motif [GAAGGG (Sequence |
| | TAGAAGGGTTTTTTT (SEQ ID NO: 263) | Number: 1779)], and transcription |
| | | adaptations |
| 264 | GCTCAGCCAGGTAGTACTGTGTTTAAGA | pegRNA*1 (GGG-to-GGA PAM |
| | GCTAGAAATAGCAAGTTTAAATAAGGC | silencing edit); contains gRNA core |
| | TAGTCCGTTATCAGCGTGAAAACGCGG | SEQ ID NO: 1856, Linker [CAAAAT |
| | CACCGAGTCGGTGCGCAGCCCCTTCGA | (Sequence Number: 1702)] + Seq. Spec. |
| | GTATCCACAGTACTACCTGGCTGACAA | 3′ Motif [CGAAGG (Sequence |
| | AATCGAAGGTTTTTTT (SEQ ID NO: 264) | Number: 1780)], and transcription |
| | | adaptations |
| 265 | GCTCAGCCAGGTAGTACTGTGTTTAAGA | pegRNA*1 (GGG-to-GGA PAM |
| | GCTAGAAATAGCAAGTTTAAATAAGGC | silencing edit); contains gRNA core |
| | TAGTCCGTTATCAGCGTGAAAACGCGG | SEQ ID NO: 1856, Linker [CCCCCC |
| | CACCGAGTCGGTGCGCAGCCCCTTCGA | (Sequence Number: 1703)] + Seq. Spec. |
| | GTATCCACAGTACTACCTGGCTGACCCC | 3′ Motif [TCGAAG (Sequence Number: |
| | CCTCGAAGTTTTTTT (SEQ ID NO: 265) | 1781)], and transcription adaptations |
| 266 | GCTCAGCCAGGTAGTACTGTGTTTAAGA | pegRNA*1 (GGG-to-GGA PAM |
| | GCTAGAAATAGCAAGTTTAAATAAGGC | silencing edit); contains gRNA core |
| | TAGTCCGTTATCAGCGTGAAAACGCGG | SEQ ID NO: 1856, Linker [ACCCGG |
| | CACCGAGTCGGTGCGCAGCCCCTTCGA | (Sequence Number: 1720)] + Seq. Spec. |
| | GTATCCACAGTACTACCTGGCTGAACCC | 3′ Motif [CTCGAA (Sequence Number: |
| | GGCTCGAATTTTTTT (SEQ ID NO: 266) | 1782)], and transcription adaptations |
| 267 | GCTCAGCCAGGTAGTACTGTGTTTAAGA | pegRNA*1 (GGG-to-GGA PAM |
| | GCTAGAAATAGCAAGTTTAAATAAGGC | silencing edit); contains gRNA core |
| | TAGTCCGTTATCAGCGTGAAAACGCGG | SEQ ID NO: 1856, Linker [ACTACA |
| | CACCGAGTCGGTGCGCAGCCCCTTCGA | (Sequence Number: 1721)] + Seq. Spec. |
| | GTATCCACAGTACTACCTGGCTGAACTA | 3′ Motif [ACTCGA (Sequence Number: |
| | CAACTCGATTTTTTT (SEQ ID NO: 267) | 1783)], and transcription adaptations |
| 268 | GCTCAGCCAGGTAGTACTGTGTTTAAGA | pegRNA*1 (GGG-to-GGA PAM |
| | GCTAGAAATAGCAAGTTTAAATAAGGC | silencing edit); contains gRNA core |
| | TAGTCCGTTATCAGCGTGAAAACGCGG | SEQ ID NO: 1856, Linker [ATTATC |
| | CACCGAGTCGGTGCGCAGCCCCTTCGA | (Sequence Number: 1722)] + Seq. Spec. |
| | GTATCCACAGTACTACCTGGCTGAATTA | 3′ Motif [TACTCG (Sequence Number: |
| | TCTACTCGTTTTTTT (SEQ ID NO: 268) | 1784)], and transcription adaptations |
| 269 | GCTCAGCCAGGTAGTACTGTGTTTAAGA | pegRNA*1 (GGG-to-GGA PAM |
| | GCTAGAAATAGCAAGTTTAAATAAGGC | silencing edit); contains gRNA core |
| | TAGTCCGTTATCAGCGTGAAAACGCGG | SEQ ID NO: 1856, Linker [AACCCG |
| | CACCGAGTCGGTGCGCAGCCCCTTCGA | (Sequence Number: 1723)] + Seq. Spec. |
| | GTATCCACAGTACTACCTGGCTGAAACC | 3′ Motif [ATACTC (Sequence Number: |
| | CGATACTCTTTTTTT (SEQ ID NO: 269) | 1694)], and transcription adaptations |
| 270 | GCTCAGCCAGGTAGTACTGTGTTTAAGA | pegRNA*1 (GGG-to-GGA PAM |
| | GCTAGAAATAGCAAGTTTAAATAAGGC | silencing edit); contains gRNA core |
| | TAGTCCGTTATCAGCGTGAAAACGCGG | SEQ ID NO: 1856, Linker [AACCCT |
| | CACCGAGTCGGTGCGCAGCCCCTTCGA | (Sequence Number: 1708)] + Seq. Spec. |
| | GTATCCACAGTACTACCTGGCTGAAACC | 3′ Motif [GATACT (Sequence Number: |
| | CTGATACTTTTTTTT (SEQ ID NO: 270) | 1792)], and transcription adaptations |
| 271 | GCTCAGCCAGGTAGTACTGTGTTTAAGA | pegRNA*1 (GGG-to-GGA PAM |
| | GCTAGAAATAGCAAGTTTAAATAAGGC | silencing edit); contains gRNA core |
| | TAGTCCGTTATCAGCGTGAAAACGCGG | SEQ ID NO: 1856, Linker [ATAAAT |
| | CACCGAGTCGGTGCGCAGCCCCTTCGA | (Sequence Number: 1724)] + Seq. Spec. |
| | GTATCCACAGTACTACCTGGCTGAATAA | 3′ Motif [GGATAC (Sequence Number: |
| | ATGGATACTTTTTTT (SEQ ID NO: 271) | 1793)], and transcription adaptations |
| 272 | GCTCAGCCAGGTAGTACTGTGTTTAAGA | pegRNA*1 (GGG-to-GGA PAM |
| | GCTAGAAATAGCAAGTTTAAATAAGGC | silencing edit); contains gRNA core |
| | TAGTCCGTTATCAGCGTGAAAACGCGG | SEQ ID NO: 1856, Linker [ATGACA |
| | CACCGAGTCGGTGCGCAGCCCCTTCGA | (Sequence Number: 1725)] + Seq. Spec. |
| | GTATCCACAGTACTACCTGGCTGAATGA | 3′ Motif [TGGATA (Sequence Number: |
| | CATGGATATTTTTTT (SEQ ID NO: 272) | 1794)], and transcription adaptations |
| 273 | GCTCAGCCAGGTAGTACTGTGTTTAAGA | pegRNA*1 (GGG-to-GGA PAM |
| | GCTAGAAATAGCAAGTTTAAATAAGGC | silencing edit); contains gRNA core |
| | TAGTCCGTTATCAGCGTGAAAACGCGG | SEQ ID NO: 1856, Linker [TTATAA |
| | CACCGAGTCGGTGCGCAGCCCCTTCGA | (Sequence Number: 1726)] + Seq. Spec. |
| | GTATCCACAGTACTACCTGGCTGATTAT | 3′ Motif [GTGGAT (Sequence Number: |
| | AAGTGGATTTTTTTT (SEQ ID NO: 273) | 1795)], and transcription adaptations |
| 274 | GCTCAGCCAGGTAGTACTGTGTTTAAGA | pegRNA*1 (GGG-to-GGA PAM |
| | GCTAGAAATAGCAAGTTTAAATAAGGC | silencing edit); contains gRNA core |
| | TAGTCCGTTATCAGCGTGAAAACGCGG | SEQ ID NO: 1856, Linker [ATAATA |
| | CACCGAGTCGGTGCGCAGCCCCTTCGA | (Sequence Number: 1727)] + Seq. Spec. |
| | GTATCCACAGTACTACCTGGCTGAATAA | 3′ Motif [TGTGGA (Sequence Number: |
| | TATGTGGATTTTTTT (SEQ ID NO: 274) | 1796)], and transcription adaptations |
| 275 | GCTCAGCCAGGTAGTACTGTGTTTTAGA | pegRNA; contains gRNA core SEQ ID |
| | GCTAGAAATAGCAAGTTAAAATAAGGC | NO: 1854, and Linker [AACATTGA |
| | TAGTCCGTTATCAACTTGAAAAAGTGGC | (Sequence Number: 1728)] + Univ. 3′ |
| | ACCGAGTCGGTGCAGCCCCTTCGAGTA | Motif |
| | CCCACAGTACTACCAACATTGACGCGTC | [CGCGTCTCTACGTGGGGGCGCG |
| | TCTACGTGGGGGCGCG (SEQ ID NO: 275) | (Sequence Number: 1850)] |
| 276 | GCTCAGCCAGGTAGTACTGTGTTTAAGA | pegRNA*1 (GGG-to-GGA PAM |
| | GCTAGAAATAGCAAGTTTAAATAAGGC | silencing edit); contains gRNA core |
| | TAGTCCGTTATCAGCGTGAAAACGCGG | SEQ ID NO: 1856, Linker [AAAATA |
| | CACCGAGTCGGTGCGCAGCCCCTTCGA | (Sequence Number: 1698)] + Seq. Spec. |
| | GTATCCACAGTACTACCTGGCTGAAAA | 3′ Motif [GGGGCTGC (Sequence |
| | ATAGGGGCTGCTTTTTTT (SEQ ID NO: | Number: 1797)], and transcription |
| | 276) | adaptations |
| 277 | GCTCAGCCAGGTAGTACTGTGTTTAAGA | pegRNA*1 (GGG-to-GGA PAM |
| | GCTAGAAATAGCAAGTTTAAATAAGGC | silencing edit); contains gRNA core |
| | TAGTCCGTTATCAGCGTGAAAACGCGG | SEQ ID NO: 1856, Linker [AAAATT |
| | CACCGAGTCGGTGCGCAGCCCCTTCGA | (Sequence Number: 1690)] + Seq. Spec. |
| | GTATCCACAGTACTACCTGGCTGAAAA | 3′ Motif [AGGGGCTG (Sequence |
| | ATTAGGGGCTGTTTTTTT (SEQ ID NO: | Number: 1798)], and transcription |
| | 277) | adaptations |
| 278 | GCTCAGCCAGGTAGTACTGTGTTTAAGA | pegRNA*1 (GGG-to-GGA PAM |
| | GCTAGAAATAGCAAGTTTAAATAAGGC | silencing edit); contains gRNA core |
| | TAGTCCGTTATCAGCGTGAAAACGCGG | SEQ ID NO: 1856, Linker [ATTAAC |
| | CACCGAGTCGGTGCGCAGCCCCTTCGA | (Sequence Number: 1700)] + Seq. Spec. |
| | GTATCCACAGTACTACCTGGCTGAATTA | 3′ Motif [AAGGGGCT (Sequence |
| | ACAAGGGGCTTTTTTTT (SEQ ID NO: | Number: 1799)], and transcription |
| | 278) | adaptations |
| 279 | GCTCAGCCAGGTAGTACTGTGTTTAAGA | pegRNA*1 (GGG-to-GGA PAM |
| | GCTAGAAATAGCAAGTTTAAATAAGGC | silencing edit); contains gRNA core |
| | TAGTCCGTTATCAGCGTGAAAACGCGG | SEQ ID NO: 1856, Linker [CTGTTA |
| | CACCGAGTCGGTGCGCAGCCCCTTCGA | (Sequence Number: 1701)] + Seq. Spec. |
| | GTATCCACAGTACTACCTGGCTGACTGT | 3′ Motif [GAAGGGGC (Sequence |
| | TAGAAGGGGCTTTTTTT (SEQ ID NO: | Number: 1800)], and transcription |
| | 279) | adaptations |
| 280 | GCTCAGCCAGGTAGTACTGTGTTTAAGA | pegRNA*1 (GGG-to-GGA PAM |
| | GCTAGAAATAGCAAGTTTAAATAAGGC | silencing edit); contains gRNA core |
| | TAGTCCGTTATCAGCGTGAAAACGCGG | SEQ ID NO: 1856, Linker [ATCTAT |
| | CACCGAGTCGGTGCGCAGCCCCTTCGA | (Sequence Number: 1712)] + Seq. Spec. |
| | GTATCCACAGTACTACCTGGCTGAATCT | 3′ Motif [CGAAGGGG (Sequence |
| | ATCGAAGGGGTTTTTTT (SEQ ID NO: | Number: 1801)], and transcription |
| | 280) | adaptations |
| 281 | GCTCAGCCAGGTAGTACTGTGTTTAAGA | pegRNA*1 (GGG-to-GGA PAM |
| | GCTAGAAATAGCAAGTTTAAATAAGGC | silencing edit); contains gRNA core |
| | TAGTCCGTTATCAGCGTGAAAACGCGG | SEQ ID NO: 1856, Linker [ACACTT |
| | CACCGAGTCGGTGCGCAGCCCCTTCGA | (Sequence Number: 1713)] + Seq. Spec. |
| | GTATCCACAGTACTACCTGGCTGAACAC | 3′ Motif [TCGAAGGG (Sequence |
| | TTTCGAAGGGTTTTTTT (SEQ ID NO: 281) | Number: 1802)], and transcription |
| | | adaptations |
| 282 | GCTCAGCCAGGTAGTACTGTGTTTAAGA | pegRNA*1 (GGG-to-GGA PAM |
| | GCTAGAAATAGCAAGTTTAAATAAGGC | silencing edit); contains gRNA core |
| | TAGTCCGTTATCAGCGTGAAAACGCGG | SEQ ID NO: 1856, Linker [ACTCGG |
| | CACCGAGTCGGTGCGCAGCCCCTTCGA | (Sequence Number: 1714)] + Seq. Spec. |
| | GTATCCACAGTACTACCTGGCTGAACTC | 3′ Motif [CTCGAAGG (Sequence |
| | GGCTCGAAGGTTTTTTT (SEQ ID NO: | Number: 1803)], and transcription |
| | 282) | adaptations |
| 283 | GCTCAGCCAGGTAGTACTGTGTTTAAGA | pegRNA*1 (GGG-to-GGA PAM |
| | GCTAGAAATAGCAAGTTTAAATAAGGC | silencing edit); contains gRNA core |
| | TAGTCCGTTATCAGCGTGAAAACGCGG | SEQ ID NO: 1856, Linker [ACCCCG |
| | CACCGAGTCGGTGCGCAGCCCCTTCGA | (Sequence Number: 1705)] + Seq. Spec. |
| | GTATCCACAGTACTACCTGGCTGAACCC | 3′ Motif [ACTCGAAG (Sequence |
| | CGACTCGAAGTTTTTTT (SEQ ID NO: 283) | Number: 1804)], and transcription |
| | | adaptations |
| 284 | GCTCAGCCAGGTAGTACTGTGTTTAAGA | pegRNA*1 (GGG-to-GGA PAM |
| | GCTAGAAATAGCAAGTTTAAATAAGGC | silencing edit); contains gRNA core |
| | TAGTCCGTTATCAGCGTGAAAACGCGG | SEQ ID NO: 1856, Linker [CCCAAG |
| | CACCGAGTCGGTGCGCAGCCCCTTCGA | (Sequence Number: 1715)] + Seq. Spec. |
| | GTATCCACAGTACTACCTGGCTGACCCA | 3′ Motif [TACTCGAA (Sequence |
| | AGTACTCGAATTTTTTT (SEQ ID NO: 284) | Number: 1805)], and transcription |
| | | adaptations |
| 285 | GCTCAGCCAGGTAGTACTGTGTTTAAGA | pegRNA*1 (GGG-to-GGA PAM |
| | GCTAGAAATAGCAAGTTTAAATAAGGC | silencing edit); contains gRNA core |
| | TAGTCCGTTATCAGCGTGAAAACGCGG | SEQ ID NO: 1856, Linker [AAAAAG |
| | CACCGAGTCGGTGCGCAGCCCCTTCGA | (Sequence Number: 1716)] + Seq. Spec. |
| | GTATCCACAGTACTACCTGGCTGAAAA | 3′ Motif [ATACTCGA (Sequence |
| | AAGATACTCGATTTTTTT (SEQ ID NO: | Number: 1812)], and transcription |
| | 285) | adaptations |
| 286 | GCTCAGCCAGGTAGTACTGTGTTTAAGA | pegRNA*1 (GGG-to-GGA PAM |
| | GCTAGAAATAGCAAGTTTAAATAAGGC | silencing edit); contains gRNA core |
| | TAGTCCGTTATCAGCGTGAAAACGCGG | SEQ ID NO: 1856, Linker [AACCCG |
| | CACCGAGTCGGTGCGCAGCCCCTTCGA | (Sequence Number: 1723)] + Seq. Spec. |
| | GTATCCACAGTACTACCTGGCTGAAACC | 3′ Motif [GATACTCG (Sequence |
| | CGGATACTCGTTTTTTT (SEQ ID NO: 286) | Number: 1813)], and transcription |
| | | adaptations |
| 287 | GCTCAGCCAGGTAGTACTGTGTTTAAGA | pegRNA*1 (GGG-to-GGA PAM |
| | GCTAGAAATAGCAAGTTTAAATAAGGC | silencing edit); contains gRNA core |
| | TAGTCCGTTATCAGCGTGAAAACGCGG | SEQ ID NO: 1856, Linker [AAAAAT |
| | CACCGAGTCGGTGCGCAGCCCCTTCGA | (Sequence Number: 1709)] + Seq. Spec. |
| | GTATCCACAGTACTACCTGGCTGAAAA | 3′ Motif [GGATACTC (Sequence |
| | AATGGATACTCTTTTTTT (SEQ ID NO: | Number: 1814)], and transcription |
| | 287) | adaptations |
| 288 | GCTCAGCCAGGTAGTACTGTGTTTAAGA | pegRNA*1 (GGG-to-GGA PAM |
| | GCTAGAAATAGCAAGTTTAAATAAGGC | silencing edit); contains gRNA core |
| | TAGTCCGTTATCAGCGTGAAAACGCGG | SEQ ID NO: 1856, Linker [AATAAT |
| | CACCGAGTCGGTGCGCAGCCCCTTCGA | (Sequence Number: 1652)] + Seq. Spec. |
| | GTATCCACAGTACTACCTGGCTGAAATA | 3′ Motif [TGGATACT (Sequence |
| | ATTGGATACTTTTTTTT (SEQ ID NO: 288) | Number: 1815)], and transcription |
| | | adaptations |
| 289 | GCTCAGCCAGGTAGTACTGTGTTTAAGA | pegRNA*1 (GGG-to-GGA PAM |
| | GCTAGAAATAGCAAGTTTAAATAAGGC | silencing edit); contains gRNA core |
| | TAGTCCGTTATCAGCGTGAAAACGCGG | SEQ ID NO: 1856, Linker [AAATAA |
| | CACCGAGTCGGTGCGCAGCCCCTTCGA | (Sequence Number: 1688)] + Seq. Spec. |
| | GTATCCACAGTACTACCTGGCTGAAAAT | 3′ Motif [GTGGATAC (Sequence |
| | AAGTGGATACTTTTTTT (SEQ ID NO: 289) | Number: 1816)], and transcription |
| | | adaptations |
| 290 | GCTCAGCCAGGTAGTACTGTGTTTAAGA | pegRNA*1 (GGG-to-GGA PAM |
| | GCTAGAAATAGCAAGTTTAAATAAGGC | silencing edit); contains gRNA core |
| | TAGTCCGTTATCAGCGTGAAAACGCGG | SEQ ID NO: 1856, Linker [AAAAAA |
| | CACCGAGTCGGTGCGCAGCCCCTTCGA | (Sequence Number: 1661)] + Seq. Spec. |
| | GTATCCACAGTACTACCTGGCTGAAAA | 3′ Motif [TGTGGATA (Sequence |
| | AAATGTGGATATTTTTTT (SEQ ID NO: | Number: 1817)], and transcription |
| | 290) | adaptations |
| 291 | GCTCAGCCAGGTAGTACTGTGTTTTAGA | pegRNA; contains gRNA core SEQ ID |
| | GCTAGAAATAGCAAGTTAAAATAAGGC | NO: 1854, and Linker [AACATTGA |
| | TAGTCCGTTATCAACTTGAAAAAGTGGC | (Sequence Number: 1728)] + Univ. 3′ |
| | ACCGAGTCGGTGCAGCCCCTTCGAGTA | Motif |
| | CCCACAGTACTACCTGAACATTGACGC | [CGCGTCTCTACGTGGGGGCGCG |
| | GTCTCTACGTGGGGGCGCG (SEQ ID NO: | (Sequence Number: 1850)] |
| | 291) | |
| 292 | GCTCAGCCAGGTAGTACTGTGTTTTAGA | pegRNA; contains gRNA core SEQ ID |
| | GCTAGAAATAGCAAGTTAAAATAAGGC | NO: 1854, and Linker [AACATTGA |
| | TAGTCCGTTATCAACTTGAAAAAGTGGC | (Sequence Number: 1728)] + Univ. 3′ |
| | ACCGAGTCGGTGCGCAGCCCCTTCGAG | Motif |
| | TACCCACAGTACTACCAACATTGACGC | [CGCGTCTCTACGTGGGGGCGCG |
| | GTCTCTACGTGGGGGCGCG (SEQ ID NO: | (Sequence Number: 1850)] |
| | 292) | |
| 293 | GCTCAGCCAGGTAGTACTGTGTTTTAGA | pegRNA; contains gRNA core SEQ ID |
| | GCTAGAAATAGCAAGTTAAAATAAGGC | NO: 1854, and Linker [AACATTGA |
| | TAGTCCGTTATCAACTTGAAAAAGTGGC | (Sequence Number: 1728)] + Univ. 3′ |
| | ACCGAGTCGGTGCAGCCCCTTCGAGTA | Motif |
| | CCCACAGTACTACCTGGAACATTGACG | [CGCGTCTCTACGTGGGGGCGCG |
| | CGTCTCTACGTGGGGGCGCG (SEQ ID | (Sequence Number: 1850)] |
| | NO: 293) | |
| 294 | GCTCAGCCAGGTAGTACTGTGTTTTAGA | pegRNA; contains gRNA core SEQ ID |
| | GCTAGAAATAGCAAGTTAAAATAAGGC | NO: 1854, and Linker [AACATTGA |
| | TAGTCCGTTATCAACTTGAAAAAGTGGC | (Sequence Number: 1728)] + Univ. 3′ |
| | ACCGAGTCGGTGCGCAGCCCCTTCGAG | Motif |
| | TACCCACAGTACTACCTAACATTGACGC | [CGCGTCTCTACGTGGGGGCGCG |
| | GTCTCTACGTGGGGGCGCG (SEQ ID NO: | (Sequence Number: 1850)] |
| | 294) | |
| 295 | GCTCAGCCAGGTAGTACTGTGTTTTAGA | pegRNA*1 (GGG-to-GGA PAM |
| | GCTAGAAATAGCAAGTTAAAATAAGGC | silencing edit); contains gRNA core |
| | TAGTCCGTTATCAACTTGAAAAAGTGGC | SEQ ID NO: 1854, and Linker |
| | ACCGAGTCGGTGCAGCCCCTTCGAGTAT | [AACATTGA (Sequence Number: |
| | CCACAGTACTACCTGGAACATTGACGC | 1728)] + Univ. 3′ Motif |
| | GTCTCTACGTGGGGGCGCG (SEQ ID NO: | [CGCGTCTCTACGTGGGGGCGCG |
| | 295) | (Sequence Number: 1850)] |
| 296 | GCTCAGCCAGGTAGTACTGTGTTTTAGA | pegRNA*1 (GGG-to-GGA PAM |
| | GCTAGAAATAGCAAGTTAAAATAAGGC | silencing edit); contains gRNA core |
| | TAGTCCGTTATCAACTTGAAAAAGTGGC | SEQ ID NO: 1854, and Linker |
| | ACCGAGTCGGTGCGCAGCCCCTTCGAG | [AACATTGA (Sequence Number: |
| | TATCCACAGTACTACCTAACATTGACGC | 1728)] + Univ. 3′ Motif |
| | GTCTCTACGTGGGGGCGCG (SEQ ID NO: | [CGCGTCTCTACGTGGGGGCGCG |
| | 296) | (Sequence Number: 1850)] |
| 297 | GCTCAGCCAGGTAGTACTGTGTTTTAGA | pegRNA; contains gRNA core SEQ ID |
| | GCTAGAAATAGCAAGTTAAAATAAGGC | NO: 1854, and Linker [AACATTGA |
| | TAGTCCGTTATCAACTTGAAAAAGTGGC | (Sequence Number: 1728)] + Univ. 3′ |
| | ACCGAGTCGGTGCAGCCCCTTCGAGTA | Motif |
| | CCCACAGTACTACCTGGCAACATTGAC | [CGCGTCTCTACGTGGGGGCGCG |
| | GCGTCTCTACGTGGGGGCGCG (SEQ ID | (Sequence Number: 1850)] |
| | NO: 297) | |
| 298 | GCTCAGCCAGGTAGTACTGTGTTTTAGA | pegRNA; contains gRNA core SEQ ID |
| | GCTAGAAATAGCAAGTTAAAATAAGGC | NO: 1854, and Linker [AACATTGA |
| | TAGTCCGTTATCAACTTGAAAAAGTGGC | (Sequence Number: 1728)] + Univ. 3′ |
| | ACCGAGTCGGTGCGCAGCCCCTTCGAG | Motif |
| | TACCCACAGTACTACCTGAACATTGACG | [CGCGTCTCTACGTGGGGGCGCG |
| | CGTCTCTACGTGGGGGCGCG (SEQ ID | (Sequence Number: 1850)] |
| | NO: 298) | |
| 299 | GCTCAGCCAGGTAGTACTGTGTTTTAGA | pegRNA; contains gRNA core SEQ ID |
| | GCTAGAAATAGCAAGTTAAAATAAGGC | NO: 1854, and Linker [AACATTGA |
| | TAGTCCGTTATCAACTTGAAAAAGTGGC | (Sequence Number: 1728)] + Univ. 3′ |
| | ACCGAGTCGGTGCACGCAGCCCCTTCG | Motif |
| | AGTACCCACAGTACTACCAACATTGAC | [CGCGTCTCTACGTGGGGGCGCG |
| | GCGTCTCTACGTGGGGGCGCG (SEQ ID | (Sequence Number: 1850)] |
| | NO: 299) | |
| 300 | GCTCAGCCAGGTAGTACTGTGTTTTAGA | pegRNA*1 (GGG-to-GGA PAM |
| | GCTAGAAATAGCAAGTTAAAATAAGGC | silencing edit); contains gRNA core |
| | TAGTCCGTTATCAACTTGAAAAAGTGGC | SEQ ID NO: 1854, and Linker |
| | ACCGAGTCGGTGCAGCCCCTTCGAGTAT | [AACATTGA (Sequence Number: |
| | CCACAGTACTACCTGGCAACATTGACG | 1728)] + Univ. 3′ Motif |
| | CGTCTCTACGTGGGGGCGCG (SEQ ID | [CGCGTCTCTACGTGGGGGCGCG |
| | NO: 300) | (Sequence Number: 1850)] |
| 301 | GCTCAGCCAGGTAGTACTGTGTTTTAGA | pegRNA*1 (GGG-to-GGA PAM |
| | GCTAGAAATAGCAAGTTAAAATAAGGC | silencing edit); contains gRNA core |
| | TAGTCCGTTATCAACTTGAAAAAGTGGC | SEQ ID NO: 1854, and Linker |
| | ACCGAGTCGGTGCGCAGCCCCTTCGAG | [AACATTGA (Sequence Number: |
| | TATCCACAGTACTACCTGAACATTGACG | 1728)] + Univ. 3′ Motif |
| | CGTCTCTACGTGGGGGCGCG (SEQ ID | [CGCGTCTCTACGTGGGGGCGCG |
| | NO: 301) | (Sequence Number: 1850)] |
| 302 | GCTCAGCCAGGTAGTACTGTGTTTTAGA | pegRNA; contains gRNA core SEQ ID |
| | GCTAGAAATAGCAAGTTAAAATAAGGC | NO: 1854, and Linker [AACATTGA |
| | TAGTCCGTTATCAACTTGAAAAAGTGGC | (Sequence Number: 1728)] + Univ. 3′ |
| | ACCGAGTCGGTGCAGCCCCTTCGAGTA | Motif |
| | CCCACAGTACTACCTGGCTAACATTGAC | [CGCGTCTCTACGTGGGGGCGCG |
| | GCGTCTCTACGTGGGGGCGCG (SEQ ID | (Sequence Number: 1850)] |
| | NO: 302) | |
| 303 | GCTCAGCCAGGTAGTACTGTGTTTTAGA | pegRNA; contains gRNA core SEQ ID |
| | GCTAGAAATAGCAAGTTAAAATAAGGC | NO: 1854, and Linker [AACATTGA |
| | TAGTCCGTTATCAACTTGAAAAAGTGGC | (Sequence Number: 1728)] + Univ. 3′ |
| | ACCGAGTCGGTGCGCAGCCCCTTCGAG | Motif |
| | TACCCACAGTACTACCTGGAACATTGAC | [CGCGTCTCTACGTGGGGGCGCG |
| | GCGTCTCTACGTGGGGGCGCG (SEQ ID | (Sequence Number: 1850)] |
| | NO: 303) | |
| 304 | GCTCAGCCAGGTAGTACTGTGTTTTAGA | pegRNA*1 (GGG-to-GGA PAM |
| | GCTAGAAATAGCAAGTTAAAATAAGGC | silencing edit); contains gRNA core |
| | TAGTCCGTTATCAACTTGAAAAAGTGGC | SEQ ID NO: 1854, and Linker |
| | ACCGAGTCGGTGCAGCCCCTTCGAGTAT | [AACATTGA (Sequence Number: |
| | CCACAGTACTACCTGGCTAACATTGACG | 1728)] + Univ. 3′ Motif |
| | CGTCTCTACGTGGGGGCGCG (SEQ ID | [CGCGTCTCTACGTGGGGGCGCG |
| | NO: 304) | (Sequence Number: 1850)] |
| 305 | GCTCAGCCAGGTAGTACTGTGTTTTAGA | pegRNA*1 (GGG-to-GGA PAM |
| | GCTAGAAATAGCAAGTTAAAATAAGGC | silencing edit); contains gRNA core |
| | TAGTCCGTTATCAACTTGAAAAAGTGGC | SEQ ID NO: 1854, and Linker |
| | ACCGAGTCGGTGCGCAGCCCCTTCGAG | [AACATTGA (Sequence Number: |
| | TATCCACAGTACTACCTGGAACATTGAC | 1728)] + Univ. 3′ Motif |
| | GCGTCTCTACGTGGGGGCGCG (SEQ ID | [CGCGTCTCTACGTGGGGGCGCG |
| | NO: 305) | (Sequence Number: 1850)] |
| 306 | GCTCAGCCAGGTAGTACTGTGTTTTAGA | pegRNA; contains gRNA core SEQ ID |
| | GCTAGAAATAGCAAGTTAAAATAAGGC | NO: 1854, and Linker [AACATTGA |
| | TAGTCCGTTATCAACTTGAAAAAGTGGC | (Sequence Number: 1728)] + Univ. 3′ |
| | ACCGAGTCGGTGCAGCCCCTTCGAGTA | Motif |
| | CCCACAGTACTACCTGGCTGAACATTGA | [CGCGTCTCTACGTGGGGGCGCG |
| | CGCGTCTCTACGTGGGGGCGCG (SEQ ID | (Sequence Number: 1850)] |
| | NO: 306) | |
| 307 | GCTCAGCCAGGTAGTACTGTGTTTTAGA | pegRNA; contains gRNA core SEQ ID |
| | GCTAGAAATAGCAAGTTAAAATAAGGC | NO: 1854, and Linker [AACATTGA |
| | TAGTCCGTTATCAACTTGAAAAAGTGGC | (Sequence Number: 1728)] + Univ. 3′ |
| | ACCGAGTCGGTGCGCAGCCCCTTCGAG | Motif |
| | TACCCACAGTACTACCTGGCAACATTGA | [CGCGTCTCTACGTGGGGGCGCG |
| | CGCGTCTCTACGTGGGGGCGCG (SEQ ID | (Sequence Number: 1850)] |
| | NO: 307) | |
| 308 | GCTCAGCCAGGTAGTACTGTGTTTTAGA | pegRNA; contains gRNA core SEQ ID |
| | GCTAGAAATAGCAAGTTAAAATAAGGC | NO: 1854, and Linker [AACATTGA |
| | TAGTCCGTTATCAACTTGAAAAAGTGGC | (Sequence Number: 1728)] + Univ. 3′ |
| | ACCGAGTCGGTGCACGCAGCCCCTTCG | Motif |
| | AGTACCCACAGTACTACCTGAACATTG | [CGCGTCTCTACGTGGGGGCGCG |
| | ACGCGTCTCTACGTGGGGGCGCG (SEQ | (Sequence Number: 1850)] |
| | ID NO: 308) | |
| 309 | GCTCAGCCAGGTAGTACTGTGTTTTAGA | pegRNA; contains gRNA core SEQ ID |
| | GCTAGAAATAGCAAGTTAAAATAAGGC | NO: 1854, and Linker [AACATTGA |
| | TAGTCCGTTATCAACTTGAAAAAGTGGC | (Sequence Number: 1728)] + Univ. 3′ |
| | ACCGAGTCGGTGCGTACGCAGCCCCTTC | Motif |
| | GAGTACCCACAGTACTACCAACATTGA | [CGCGTCTCTACGTGGGGGCGCG |
| | CGCGTCTCTACGTGGGGGCGCG (SEQ ID | (Sequence Number: 1850)] |
| | NO: 309) | |
| 310 | GCTCAGCCAGGTAGTACTGTGTTTTAGA | pegRNA*1 (GGG-to-GGA PAM |
| | GCTAGAAATAGCAAGTTAAAATAAGGC | silencing edit); contains gRNA core |
| | TAGTCCGTTATCAACTTGAAAAAGTGGC | SEQ ID NO: 1854, and Linker |
| | ACCGAGTCGGTGCAGCCCCTTCGAGTAT | [AACATTGA (Sequence Number: |
| | CCACAGTACTACCTGGCTGAACATTGAC | 1728)] + Univ. 3′ Motif |
| | GCGTCTCTACGTGGGGGCGCG (SEQ ID | [CGCGTCTCTACGTGGGGGCGCG |
| | NO: 310) | (Sequence Number: 1850)] |
| 311 | GCTCAGCCAGGTAGTACTGTGTTTTAGA | pegRNA*1 (GGG-to-GGA PAM |
| | GCTAGAAATAGCAAGTTAAAATAAGGC | silencing edit); contains gRNA core |
| | TAGTCCGTTATCAACTTGAAAAAGTGGC | SEQ ID NO: 1854, and Linker |
| | ACCGAGTCGGTGCGCAGCCCCTTCGAG | [AACATTGA (Sequence Number: |
| | TATCCACAGTACTACCTGGCAACATTGA | 1728)] + Univ. 3′ Motif |
| | CGCGTCTCTACGTGGGGGCGCG (SEQ ID | [CGCGTCTCTACGTGGGGGCGCG |
| | NO: 311) | (Sequence Number: 1850)] |
| 312 | GCTCAGCCAGGTAGTACTGTGTTTTAGA | pegRNA; contains gRNA core SEQ ID |
| | GCTAGAAATAGCAAGTTAAAATAAGGC | NO: 1854, and Linker [AACATTGA |
| | TAGTCCGTTATCAACTTGAAAAAGTGGC | (Sequence Number: 1728)] + Univ. 3′ |
| | ACCGAGTCGGTGCAGCCCCTTCGAGTA | Motif |
| | CCCACAGTACTACCTGGCTGAAACATTG | [CGCGTCTCTACGTGGGGGCGCG |
| | ACGCGTCTCTACGTGGGGGCGCG (SEQ | (Sequence Number: 1850)] |
| | ID NO: 312) | |
| 313 | GCTCAGCCAGGTAGTACTGTGTTTTAGA | pegRNA; contains gRNA core SEQ ID |
| | GCTAGAAATAGCAAGTTAAAATAAGGC | NO: 1854, and Linker [AACATTGA |
| | TAGTCCGTTATCAACTTGAAAAAGTGGC | (Sequence Number: 1728)] + Univ. 3′ |
| | ACCGAGTCGGTGCGCAGCCCCTTCGAG | Motif |
| | TACCCACAGTACTACCTGGCTAACATTG | [CGCGTCTCTACGTGGGGGCGCG |
| | ACGCGTCTCTACGTGGGGGCGCG (SEQ | (Sequence Number: 1850)] |
| | ID NO: 313) | |
| 314 | GCTCAGCCAGGTAGTACTGTGTTTTAGA | pegRNA*1 (GGG-to-GGA PAM |
| | GCTAGAAATAGCAAGTTAAAATAAGGC | silencing edit); contains gRNA core |
| | TAGTCCGTTATCAACTTGAAAAAGTGGC | SEQ ID NO: 1854, and Linker |
| | ACCGAGTCGGTGCAGCCCCTTCGAGTAT | [AACATTGA (Sequence Number: |
| | CCACAGTACTACCTGGCTGAAACATTG | 1728)] + Univ. 3′ Motif |
| | ACGCGTCTCTACGTGGGGGCGCG (SEQ | [CGCGTCTCTACGTGGGGGCGCG |
| | ID NO: 314) | (Sequence Number: 1850)] |
| 315 | GCTCAGCCAGGTAGTACTGTGTTTTAGA | pegRNA*1 (GGG-to-GGA PAM |
| | GCTAGAAATAGCAAGTTAAAATAAGGC | silencing edit); contains gRNA core |
| | TAGTCCGTTATCAACTTGAAAAAGTGGC | SEQ ID NO: 1854, and Linker |
| | ACCGAGTCGGTGCGCAGCCCCTTCGAG | [AACATTGA (Sequence Number: |
| | TATCCACAGTACTACCTGGCTAACATTG | 1728)] + Univ. 3′ Motif |
| | ACGCGTCTCTACGTGGGGGCGCG (SEQ | [CGCGTCTCTACGTGGGGGCGCG |
| | ID NO: 315) | (Sequence Number: 1850)] |
| 316 | GCTCAGCCAGGTAGTACTGTGTTTTAGA | pegRNA; contains gRNA core SEQ ID |
| | GCTAGAAATAGCAAGTTAAAATAAGGC | NO: 1854, and Linker [AACATTGA |
| | TAGTCCGTTATCAACTTGAAAAAGTGGC | (Sequence Number: 1728)] + Univ. 3′ |
| | ACCGAGTCGGTGCGCAGCCCCTTCGAG | Motif |
| | TACCCACAGTACTACCTGGCTGAACATT | [CGCGTCTCTACGTGGGGGCGCG |
| | GACGCGTCTCTACGTGGGGGCGCG (SEQ | (Sequence Number: 1850)] |
| | ID NO: 316) | |
| 317 | GCTCAGCCAGGTAGTACTGTGTTTTAGA | pegRNA; contains gRNA core SEQ ID |
| | GCTAGAAATAGCAAGTTAAAATAAGGC | NO: 1854, and Linker [AACATTGA |
| | TAGTCCGTTATCAACTTGAAAAAGTGGC | (Sequence Number: 1728)] + Univ. 3′ |
| | ACCGAGTCGGTGCACGCAGCCCCTTCG | Motif |
| | AGTACCCACAGTACTACCTGGCAACATT | [CGCGTCTCTACGTGGGGGCGCG |
| | GACGCGTCTCTACGTGGGGGCGCG (SEQ | (Sequence Number: 1850)] |
| | ID NO: 317) | |
| 318 | GCTCAGCCAGGTAGTACTGTGTTTTAGA | pegRNA; contains gRNA core SEQ ID |
| | GCTAGAAATAGCAAGTTAAAATAAGGC | NO: 1854, and Linker [AACATTGA |
| | TAGTCCGTTATCAACTTGAAAAAGTGGC | (Sequence Number: 1728)] + Univ. 3′ |
| | ACCGAGTCGGTGCGTACGCAGCCCCTTC | Motif |
| | GAGTACCCACAGTACTACCTGAACATT | [CGCGTCTCTACGTGGGGGCGCG |
| | GACGCGTCTCTACGTGGGGGCGCG (SEQ | (Sequence Number: 1850)] |
| | ID NO: 318) | |
| 319 | GCTCAGCCAGGTAGTACTGTGTTTTAGA | pegRNA; contains gRNA core SEQ ID |
| | GCTAGAAATAGCAAGTTAAAATAAGGC | NO: 1854, and Linker [AACATTGA |
| | TAGTCCGTTATCAACTTGAAAAAGTGGC | (Sequence Number: 1728)] + Univ. 3′ |
| | ACCGAGTCGGTGCTGGTACGCAGCCCC | Motif |
| | TTCGAGTACCCACAGTACTACCAACATT | [CGCGTCTCTACGTGGGGGCGCG |
| | GACGCGTCTCTACGTGGGGGCGCG (SEQ | (Sequence Number: 1850)] |
| | ID NO: 319) | |
| 320 | GCTCAGCCAGGTAGTACTGTGTTTTAGA | pegRNA; contains gRNA core SEQ ID |
| | GCTAGAAATAGCAAGTTAAAATAAGGC | NO: 1854, and Linker [AACATTGA |
| | TAGTCCGTTATCAACTTGAAAAAGTGGC | (Sequence Number: 1728)] + Univ. 3′ |
| | ACCGAGTCGGTGCAGCCCCTTCGAGTA | Motif |
| | CCCACAGTACTACCTGGCTGAGAACATT | [CGCGTCTCTACGTGGGGGCGCG |
| | GACGCGTCTCTACGTGGGGGCGCG (SEQ | (Sequence Number: 1850)] |
| | ID NO: 320) | |
| 321 | GCTCAGCCAGGTAGTACTGTGTTTTAGA | pegRNA*1 (GGG-to-GGA PAM |
| | GCTAGAAATAGCAAGTTAAAATAAGGC | silencing edit); contains gRNA core |
| | TAGTCCGTTATCAACTTGAAAAAGTGGC | SEQ ID NO: 1854, and Linker |
| | ACCGAGTCGGTGCAGCCCCTTCGAGTAT | [AACATTGA (Sequence Number: |
| | CCACAGTACTACCTGGCTGAGAACATT | 1728)] + Univ. 3′ Motif |
| | GACGCGTCTCTACGTGGGGGCGCG (SEQ | [CGCGTCTCTACGTGGGGGCGCG |
| | ID NO: 321) | (Sequence Number: 1850)] |
| 322 | GCTCAGCCAGGTAGTACTGTGTTTTAGA | pegRNA*1 (GGG-to-GGA PAM |
| | GCTAGAAATAGCAAGTTAAAATAAGGC | silencing edit); contains gRNA core |
| | TAGTCCGTTATCAACTTGAAAAAGTGGC | SEQ ID NO: 1854, and Linker |
| | ACCGAGTCGGTGCGCAGCCCCTTCGAG | [AACATTGA (Sequence Number: |
| | TATCCACAGTACTACCTGGCTGAACATT | 1728)] + Univ. 3′ Motif |
| | GACGCGTCTCTACGTGGGGGCGCG (SEQ | [CGCGTCTCTACGTGGGGGCGCG |
| | ID NO: 322) | (Sequence Number: 1850)] |
| 323 | GCTCAGCCAGGTAGTACTGTGTTTTAGA | pegRNA; contains gRNA core SEQ ID |
| | GCTAGAAATAGCAAGTTAAAATAAGGC | NO: 1854, and Linker [AACATTGA |
| | TAGTCCGTTATCAACTTGAAAAAGTGGC | (Sequence Number: 1728)] + Univ. 3′ |
| | ACCGAGTCGGTGCGCAGCCCCTTCGAG | Motif |
| | TACCCACAGTACTACCTGGCTGAAACAT | [CGCGTCTCTACGTGGGGGCGCG |
| | TGACGCGTCTCTACGTGGGGGCGCG | (Sequence Number: 1850)] |
| | (SEQ ID NO: 323) | |
| 324 | GCTCAGCCAGGTAGTACTGTGTTTTAGA | pegRNA*1 (GGG-to-GGA PAM |
| | GCTAGAAATAGCAAGTTAAAATAAGGC | silencing edit); contains gRNA core |
| | TAGTCCGTTATCAACTTGAAAAAGTGGC | SEQ ID NO: 1854, and Linker |
| | ACCGAGTCGGTGCGCAGCCCCTTCGAG | [AACATTGA (Sequence Number: |
| | TATCCACAGTACTACCTGGCTGAAACAT | 1728)] + Univ. 3′ Motif |
| | TGACGCGTCTCTACGTGGGGGCGCG | [CGCGTCTCTACGTGGGGGCGCG |
| | (SEQ ID NO: 324) | (Sequence Number: 1850)] |
| 325 | GCTCAGCCAGGTAGTACTGTGTTTTAGA | pegRNA; contains gRNA core SEQ ID |
| | GCTAGAAATAGCAAGTTAAAATAAGGC | NO: 1854, and Linker [AACATTGA |
| | TAGTCCGTTATCAACTTGAAAAAGTGGC | (Sequence Number: 1728)] + Univ. 3′ |
| | ACCGAGTCGGTGCACGCAGCCCCTTCG | Motif |
| | AGTACCCACAGTACTACCTGGCTGAAC | [CGCGTCTCTACGTGGGGGCGCG |
| | ATTGACGCGTCTCTACGTGGGGGCGCG | (Sequence Number: 1850)] |
| | (SEQ ID NO: 325) | |
| 326 | GCTCAGCCAGGTAGTACTGTGTTTTAGA | pegRNA; contains gRNA core SEQ ID |
| | GCTAGAAATAGCAAGTTAAAATAAGGC | NO: 1854, and Linker [AACATTGA |
| | TAGTCCGTTATCAACTTGAAAAAGTGGC | (Sequence Number: 1728)] + Univ. 3′ |
| | ACCGAGTCGGTGCGTACGCAGCCCCTTC | Motif |
| | GAGTACCCACAGTACTACCTGGCAACA | [CGCGTCTCTACGTGGGGGCGCG |
| | TTGACGCGTCTCTACGTGGGGGCGCG | (Sequence Number: 1850)] |
| | (SEQ ID NO: 326) | |
| 327 | GCTCAGCCAGGTAGTACTGTGTTTTAGA | pegRNA; contains gRNA core SEQ ID |
| | GCTAGAAATAGCAAGTTAAAATAAGGC | NO: 1854, and Linker [AACATTGA |
| | TAGTCCGTTATCAACTTGAAAAAGTGGC | (Sequence Number: 1728)] + Univ. 3′ |
| | ACCGAGTCGGTGCTGGTACGCAGCCCC | Motif |
| | TTCGAGTACCCACAGTACTACCTGAACA | [CGCGTCTCTACGTGGGGGCGCG |
| | TTGACGCGTCTCTACGTGGGGGCGCG | (Sequence Number: 1850)] |
| | (SEQ ID NO: 327) | |
| 328 | GCTCAGCCAGGTAGTACTGTGTTTTAGA | pegRNA; contains gRNA core SEQ ID |
| | GCTAGAAATAGCAAGTTAAAATAAGGC | NO: 1854, and Linker [AACATTGA |
| | TAGTCCGTTATCAACTTGAAAAAGTGGC | (Sequence Number: 1728)] + Univ. 3′ |
| | ACCGAGTCGGTGCTGTGGTACGCAGCC | Motif |
| | CCTTCGAGTACCCACAGTACTACCAACA | [CGCGTCTCTACGTGGGGGCGCG |
| | TTGACGCGTCTCTACGTGGGGGCGCG | (Sequence Number: 1850)] |
| | (SEQ ID NO: 328) | |
| 329 | GCTCAGCCAGGTAGTACTGTGTTTTAGA | pegRNA; contains gRNA core SEQ ID |
| | GCTAGAAATAGCAAGTTAAAATAAGGC | NO: 1854, and Linker [AACATTGA |
| | TAGTCCGTTATCAACTTGAAAAAGTGGC | (Sequence Number: 1728)] + Univ. 3′ |
| | ACCGAGTCGGTGCGCAGCCCCTTCGAG | Motif |
| | TACCCACAGTACTACCTGGCTGAGAAC | [CGCGTCTCTACGTGGGGGCGCG |
| | ATTGACGCGTCTCTACGTGGGGGCGCG | (Sequence Number: 1850)] |
| | (SEQ ID NO: 329) | |
| 330 | GCTCAGCCAGGTAGTACTGTGTTTTAGA | pegRNA*1 (GGG-to-GGA PAM |
| | GCTAGAAATAGCAAGTTAAAATAAGGC | silencing edit); contains gRNA core |
| | TAGTCCGTTATCAACTTGAAAAAGTGGC | SEQ ID NO: 1854, and Linker |
| | ACCGAGTCGGTGCGCAGCCCCTTCGAG | [AACATTGA (Sequence Number: |
| | TATCCACAGTACTACCTGGCTGAGAAC | 1728)] + Univ. 3′ Motif |
| | ATTGACGCGTCTCTACGTGGGGGCGCG | [CGCGTCTCTACGTGGGGGCGCG |
| | (SEQ ID NO: 330) | (Sequence Number: 1850)] |
| 331 | GCTCAGCCAGGTAGTACTGTGTTTTAGA | pegRNA; contains gRNA core SEQ ID |
| | GCTAGAAATAGCAAGTTAAAATAAGGC | NO: 1854, Linker [ATCTAT (Sequence |
| | TAGTCCGTTATCAACTTGAAAAAGTGGC | Number: 1712)] + Univ. 3′ Motif |
| | ACCGAGTCGGTGCGCAGCCCCTTCGAG | [CGGGTCTCTACGTGGGGGCCCG |
| | TACCCACAGTACTACCTGGATCTATCGG | (Sequence Number: 1851)], and |
| | GTCTCTACGTGGGGGCCCGTTTTTTT | transcription adaptations |
| | (SEQ ID NO: 331) | |
| 332 | GCTCAGCCAGGTAGTACTGTGTTTAAGA | pegRNA; contains gRNA core SEQ ID |
| | GCTAGAAATAGCAAGTTTAAATAAGGC | NO: 1855, Linker [ATCTAT (Sequence |
| | TAGTCCGTTATCAACTTGAAAAAGTGGC | Number: 1712)] + Univ. 3′ Motif |
| | ACCGAGTCGGTGCGCAGCCCCTTCGAG | [CGGGTCTCTACGTGGGGGCCCG |
| | TACCCACAGTACTACCTGGATCTATCGG | (Sequence Number: 1851)], and |
| | GTCTCTACGTGGGGGCCCGTTTTTTT | transcription adaptations |
| | (SEQ ID NO: 332) | |
| 333 | GCTCAGCCAGGTAGTACTGTGTTTAAGA | pegRNA; contains gRNA core SEQ ID |
| | GCTAGAAATAGCAAGTTTAAATAAGGC | NO: 1856, Linker [ATCTAT (Sequence |
| | TAGTCCGTTATCAGCGTGAAAACGCGG | Number: 1712)] + Univ. 3′ Motif |
| | CACCGAGTCGGTGCGCAGCCCCTTCGA | [CGGGTCTCTACGTGGGGGCCCG |
| | GTACCCACAGTACTACCTGGATCTATCG | (Sequence Number: 1851)], and |
| | GGTCTCTACGTGGGGGCCCGTTTTTTT | transcription adaptations |
| | (SEQ ID NO: 333) | |
| 334 | GCTCAGCCAGGTAGTACTGTGTTTTAGA | pegRNA; contains gRNA core SEQ ID |
| | GCTAGAAATAGCAAGTTAAAATAAGGC | NO: 1854, Linker [AATTAT (Sequence |
| | TAGTCCGTTATCAACTTGAAAAAGTGGC | Number: 1729)] + Univ. 3′ Motif |
| | ACCGAGTCGGTGCGCAGCCCCTTCGAG | [CGGGTCTCTACGTGGGGGCCCG |
| | TACCCACAGTACTACCTGGAATTATCGG | (Sequence Number: 1851)], and |
| | GTCTCTACGTGGGGGCCCGTTTTTTT | transcription adaptations |
| | (SEQ ID NO: 334) | |
| 335 | GCTCAGCCAGGTAGTACTGTGTTTAAGA | pegRNA; contains gRNA core SEQ ID |
| | GCTAGAAATAGCAAGTTTAAATAAGGC | NO: 1855, Linker [AATTAT (Sequence |
| | TAGTCCGTTATCAACTTGAAAAAGTGGC | Number: 1729)] + Univ. 3′ Motif |
| | ACCGAGTCGGTGCGCAGCCCCTTCGAG | [CGGGTCTCTACGTGGGGGCCCG |
| | TACCCACAGTACTACCTGGAATTATCGG | (Sequence Number: 1851)], and |
| | GTCTCTACGTGGGGGCCCGTTTTTTT | transcription adaptations |
| | (SEQ ID NO: 335) | |
| 336 | GCTCAGCCAGGTAGTACTGTGTTTAAGA | pegRNA; contains gRNA core SEQ ID |
| | GCTAGAAATAGCAAGTTTAAATAAGGC | NO: 1856, Linker [AATTAT (Sequence |
| | TAGTCCGTTATCAGCGTGAAAACGCGG | Number: 1729)] + Univ. 3′ Motif |
| | CACCGAGTCGGTGCGCAGCCCCTTCGA | [CGGGTCTCTACGTGGGGGCCCG |
| | GTACCCACAGTACTACCTGGAATTATCG | (Sequence Number: 1851)], and |
| | GGTCTCTACGTGGGGGCCCGTTTTTTT | transcription adaptations |
| | (SEQ ID NO: 336) | |
| 337 | GCTCAGCCAGGTAGTACTGTGTTTTAGA | pegRNA; contains gRNA core SEQ ID |
| | GCTAGAAATAGCAAGTTAAAATAAGGC | NO: 1854, Linker [ACATTC (Sequence |
| | TAGTCCGTTATCAACTTGAAAAAGTGGC | Number: 1730)] + Univ. 3′ Motif |
| | ACCGAGTCGGTGCGCAGCCCCTTCGAG | [GCGGCACCGTCCGCCCAAACGG |
| | TACCCACAGTACTACCTGGACATTCGCG | (Sequence Number: 1852)], and |
| | GCACCGTCCGCCCAAACGGTTTTTTT | transcription adaptations |
| | (SEQ ID NO: 337) | |
| 338 | GCTCAGCCAGGTAGTACTGTGTTTAAGA | pegRNA; contains gRNA core SEQ ID |
| | GCTAGAAATAGCAAGTTTAAATAAGGC | NO: 1855, Linker [ACATTC (Sequence |
| | TAGTCCGTTATCAACTTGAAAAAGTGGC | Number: 1730)] + Univ. 3′ Motif |
| | ACCGAGTCGGTGCGCAGCCCCTTCGAG | [GCGGCACCGTCCGCCCAAACGG |
| | TACCCACAGTACTACCTGGACATTCGCG | (Sequence Number: 1852)], and |
| | GCACCGTCCGCCCAAACGGTTTTTTT | transcription adaptations |
| | (SEQ ID NO: 338) | |
| 339 | GCTCAGCCAGGTAGTACTGTGTTTAAGA | pegRNA; contains gRNA core SEQ ID |
| | GCTAGAAATAGCAAGTTTAAATAAGGC | NO: 1856, Linker [ACATTC (Sequence |
| | TAGTCCGTTATCAGCGTGAAAACGCGG | Number: 1730)] + Univ. 3′ Motif |
| | CACCGAGTCGGTGCGCAGCCCCTTCGA | [GCGGCACCGTCCGCCCAAACGG |
| | GTACCCACAGTACTACCTGGACATTCGC | (Sequence Number: 1852)], and |
| | GGCACCGTCCGCCCAAACGGTTTTTTT | transcription adaptations |
| | (SEQ ID NO: 339) | |
| 340 | GCTCAGCCAGGTAGTACTGTGTTTTAGA | pegRNA; contains gRNA core SEQ ID |
| | GCTAGAAATAGCAAGTTAAAATAAGGC | NO: 1854, Linker [AGATTC (Sequence |
| | TAGTCCGTTATCAACTTGAAAAAGTGGC | Number: 1731)] + Univ. 3′ Motif |
| | ACCGAGTCGGTGCGCAGCCCCTTCGAG | [GCGGCACCGTCCGCCCAAACGG |
| | TACCCACAGTACTACCTGGAGATTCGCG | (Sequence Number: 1852)], and |
| | GCACCGTCCGCCCAAACGGTTTTTTT | transcription adaptations |
| | (SEQ ID NO: 340) | |
| 341 | GCTCAGCCAGGTAGTACTGTGTTTAAGA | pegRNA; contains gRNA core SEQ ID |
| | GCTAGAAATAGCAAGTTTAAATAAGGC | NO: 1855, Linker [AGATTC (Sequence |
| | TAGTCCGTTATCAACTTGAAAAAGTGGC | Number: 1731)] + Univ. 3′ Motif |
| | ACCGAGTCGGTGCGCAGCCCCTTCGAG | [GCGGCACCGTCCGCCCAAACGG |
| | TACCCACAGTACTACCTGGAGATTCGCG | (Sequence Number: 1852)], and |
| | GCACCGTCCGCCCAAACGGTTTTTTT | transcription adaptations |
| | (SEQ ID NO: 341) | |
| 342 | GCTCAGCCAGGTAGTACTGTGTTTAAGA | pegRNA; contains gRNA core SEQ ID |
| | GCTAGAAATAGCAAGTTTAAATAAGGC | NO: 1856, Linker [AGATTC (Sequence |
| | TAGTCCGTTATCAGCGTGAAAACGCGG | Number: 1731)] + Univ. 3′ Motif |
| | CACCGAGTCGGTGCGCAGCCCCTTCGA | [GCGGCACCGTCCGCCCAAACGG |
| | GTACCCACAGTACTACCTGGAGATTCGC | (Sequence Number: 1852)], and |
| | GGCACCGTCCGCCCAAACGGTTTTTTT | transcription adaptations |
| | (SEQ ID NO: 342) | |
| 343 | GCTCAGCCAGGTAGTACTGTGTTTTAGA | pegRNA*1 (GGG-to-GGA PAM |
| | GCTAGAAATAGCAAGTTAAAATAAGGC | silencing edit); contains gRNA core |
| | TAGTCCGTTATCAACTTGAAAAAGTGGC | SEQ ID NO: 1854, Linker [TCCTAC |
| | ACCGAGTCGGTGCAGCCCCTTCGAGTAT | (Sequence Number: 1732)] + Univ. 3′ |
| | CCACAGTACTACCTGGCTTCCTACCGGG | Motif |
| | TCTCTACGTGGGGGCCCGTTTTTTT (SEQ | [CGGGTCTCTACGTGGGGGCCCG |
| | ID NO: 343) | (Sequence Number: 1851)], and |
| | | transcription adaptations |
| 344 | GCTCAGCCAGGTAGTACTGTGTTTAAGA | pegRNA*1 (GGG-to-GGA PAM |
| | GCTAGAAATAGCAAGTTTAAATAAGGC | silencing edit); contains gRNA core |
| | TAGTCCGTTATCAACTTGAAAAAGTGGC | SEQ ID NO: 1855, Linker [TCCTAC |
| | ACCGAGTCGGTGCAGCCCCTTCGAGTAT | (Sequence Number: 1732)] + Univ. 3′ |
| | CCACAGTACTACCTGGCTTCCTACCGGG | Motif |
| | TCTCTACGTGGGGGCCCGTTTTTTT (SEQ | [CGGGTCTCTACGTGGGGGCCCG |
| | ID NO: 344) | (Sequence Number: 1851)], and |
| | | transcription adaptations |
| 345 | GCTCAGCCAGGTAGTACTGTGTTTAAGA | pegRNA*1 (GGG-to-GGA PAM |
| | GCTAGAAATAGCAAGTTTAAATAAGGC | silencing edit); contains gRNA core |
| | TAGTCCGTTATCAGCGTGAAAACGCGG | SEQ ID NO: 1856, Linker [TCCTAC |
| | CACCGAGTCGGTGCAGCCCCTTCGAGT | (Sequence Number: 1732)] + Univ. 3′ |
| | ATCCACAGTACTACCTGGCTTCCTACCG | Motif |
| | GGTCTCTACGTGGGGGCCCGTTTTTTT | [CGGGTCTCTACGTGGGGGCCCG |
| | (SEQ ID NO: 345) | (Sequence Number: 1851)], and |
| | | transcription adaptations |
| 346 | GCTCAGCCAGGTAGTACTGTGTTTTAGA | pegRNA*1 (GGG-to-GGA PAM |
| | GCTAGAAATAGCAAGTTAAAATAAGGC | silencing edit); contains gRNA core |
| | TAGTCCGTTATCAACTTGAAAAAGTGGC | SEQ ID NO: 1854, Linker [ACTTAC |
| | ACCGAGTCGGTGCAGCCCCTTCGAGTAT | (Sequence Number: 1733)] + Univ. 3′ |
| | CCACAGTACTACCTGGCTACTTACCGGG | Motif |
| | TCTCTACGTGGGGGCCCGTTTTTTT (SEQ | [CGGGTCTCTACGTGGGGGCCCG |
| | ID NO: 346) | (Sequence Number: 1851)], and |
| | | transcription adaptations |
| 347 | GCTCAGCCAGGTAGTACTGTGTTTAAGA | pegRNA*1 (GGG-to-GGA PAM |
| | GCTAGAAATAGCAAGTTTAAATAAGGC | silencing edit); contains gRNA core |
| | TAGTCCGTTATCAACTTGAAAAAGTGGC | SEQ ID NO: 1855, Linker [ACTTAC |
| | ACCGAGTCGGTGCAGCCCCTTCGAGTAT | (Sequence Number: 1733)] + Univ. 3′ |
| | CCACAGTACTACCTGGCTACTTACCGGG | Motif |
| | TCTCTACGTGGGGGCCCGTTTTTTT (SEQ | [CGGGTCTCTACGTGGGGGCCCG |
| | ID NO: 347) | (Sequence Number: 1851)], and |
| | | transcription adaptations |
| 348 | GCTCAGCCAGGTAGTACTGTGTTTAAGA | pegRNA*1 (GGG-to-GGA PAM |
| | GCTAGAAATAGCAAGTTTAAATAAGGC | silencing edit); contains gRNA core |
| | TAGTCCGTTATCAGCGTGAAAACGCGG | SEQ ID NO: 1856, Linker [ACTTAC |
| | CACCGAGTCGGTGCAGCCCCTTCGAGT | (Sequence Number: 1733)] + Univ. 3′ |
| | ATCCACAGTACTACCTGGCTACTTACCG | Motif |
| | GGTCTCTACGTGGGGGCCCGTTTTTTT | [CGGGTCTCTACGTGGGGGCCCG |
| | (SEQ ID NO: 348) | (Sequence Number: 1851)], and |
| | | transcription adaptations |
| 349 | GCTCAGCCAGGTAGTACTGTGTTTTAGA | pegRNA*1 (GGG-to-GGA PAM |
| | GCTAGAAATAGCAAGTTAAAATAAGGC | silencing edit); contains gRNA core |
| | TAGTCCGTTATCAACTTGAAAAAGTGGC | SEQ ID NO: 1854, Linker [TTCAAT |
| | ACCGAGTCGGTGCAGCCCCTTCGAGTAT | (Sequence Number: 1734)] + Univ. 3′ |
| | CCACAGTACTACCTGGCTTTCAATGCGG | Motif |
| | CACCGTCCGCCCAAACGGTTTTTTT | [GCGGCACCGTCCGCCCAAACGG |
| | (SEQ ID NO: 349) | (Sequence Number: 1852)], and |
| | | transcription adaptations |
| 350 | GCTCAGCCAGGTAGTACTGTGTTTAAGA | pegRNA*1 (GGG-to-GGA PAM |
| | GCTAGAAATAGCAAGTTTAAATAAGGC | silencing edit); contains gRNA core |
| | TAGTCCGTTATCAACTTGAAAAAGTGGC | SEQ ID NO: 1855, Linker [TTCAAT |
| | ACCGAGTCGGTGCAGCCCCTTCGAGTAT | (Sequence Number: 1734)] + Univ. 3′ |
| | CCACAGTACTACCTGGCTTTCAATGCGG | Motif |
| | CACCGTCCGCCCAAACGGTTTTTTT | [GCGGCACCGTCCGCCCAAACGG |
| | (SEQ ID NO: 350) | (Sequence Number: 1852)], and |
| | | transcription adaptations |
| 351 | GCTCAGCCAGGTAGTACTGTGTTTAAGA | pegRNA*1 (GGG-to-GGA PAM |
| | GCTAGAAATAGCAAGTTTAAATAAGGC | silencing edit); contains gRNA core |
| | TAGTCCGTTATCAGCGTGAAAACGCGG | SEQ ID NO: 1856, Linker [TTCAAT |
| | CACCGAGTCGGTGCAGCCCCTTCGAGT | (Sequence Number: 1734)] + Univ. 3′ |
| | ATCCACAGTACTACCTGGCTTTCAATGC | Motif |
| | GGCACCGTCCGCCCAAACGGTTTTTTT | [GCGGCACCGTCCGCCCAAACGG |
| | (SEQ ID NO: 351) | (Sequence Number: 1852)], and |
| | | transcription adaptations |
| 352 | GCTCAGCCAGGTAGTACTGTGTTTTAGA | pegRNA*1 (GGG-to-GGA PAM |
| | GCTAGAAATAGCAAGTTAAAATAAGGC | silencing edit); contains gRNA core |
| | TAGTCCGTTATCAACTTGAAAAAGTGGC | SEQ ID NO: 1854, Linker [TTCTAT |
| | ACCGAGTCGGTGCAGCCCCTTCGAGTAT | (Sequence Number: 1676)] + Univ. 3′ |
| | CCACAGTACTACCTGGCTTTCTATGCGG | Motif |
| | CACCGTCCGCCCAAACGGTTTTTTT | [GCGGCACCGTCCGCCCAAACGG |
| | (SEQ ID NO: 352) | (Sequence Number: 1852)], and |
| | | transcription adaptations |
| 353 | GCTCAGCCAGGTAGTACTGTGTTTAAGA | pegRNA*1 (GGG-to-GGA PAM |
| | GCTAGAAATAGCAAGTTTAAATAAGGC | silencing edit); contains gRNA core |
| | TAGTCCGTTATCAACTTGAAAAAGTGGC | SEQ ID NO: 1855, Linker [TTCTAT |
| | ACCGAGTCGGTGCAGCCCCTTCGAGTAT | (Sequence Number: 1676)] + Univ. 3′ |
| | CCACAGTACTACCTGGCTTTCTATGCGG | Motif |
| | CACCGTCCGCCCAAACGGTTTTTTT | [GCGGCACCGTCCGCCCAAACGG |
| | (SEQ ID NO: 353) | (Sequence Number: 1852)], and |
| | | transcription adaptations |
| 354 | GCTCAGCCAGGTAGTACTGTGTTTAAGA | pegRNA*1 (GGG-to-GGA PAM |
| | GCTAGAAATAGCAAGTTTAAATAAGGC | silencing edit); contains gRNA core |
| | TAGTCCGTTATCAGCGTGAAAACGCGG | SEQ ID NO: 1856, Linker [TTCTAT |
| | CACCGAGTCGGTGCAGCCCCTTCGAGT | (Sequence Number: 1676)] + Univ. 3′ |
| | ATCCACAGTACTACCTGGCTTTCTATGC | Motif |
| | GGCACCGTCCGCCCAAACGGTTTTTTT | [GCGGCACCGTCCGCCCAAACGG |
| | (SEQ ID NO: 354) | (Sequence Number: 1852)], and |
| | | transcription adaptations |
| 355 | GCTCAGCCAGGTAGTACTGTGTTTTAGA | pegRNA*1 (GGG-to-GGA PAM |
| | GCTAGAAATAGCAAGTTAAAATAAGGC | silencing edit); contains gRNA core |
| | TAGTCCGTTATCAACTTGAAAAAGTGGC | SEQ ID NO: 1854, Linker |
| | ACCGAGTCGGTGCAGCCCCTTCGAGTAT | [AACATTGA (Sequence Number: |
| | CCACAGTACTACCTGGAACATTGACGC | 1728)] + Univ. 3′ Motif |
| | GTCTCTACGTGGGGGCGCGTTTTTTT | [CGCGTCTCTACGTGGGGGCGCG |
| | (SEQ ID NO: 355) | (Sequence Number: 1850)], and |
| | | transcription adaptations |
| 356 | GCTCAGCCAGGTAGTACTGTGTTTTAGA | pegRNA; contains gRNA core SEQ ID |
| | GCTAGAAATAGCAAGTTAAAATAAGGC | NO: 1854, Linker [AACATTGA |
| | TAGTCCGTTATCAACTTGAAAAAGTGGC | (Sequence Number: 1728)] + Univ. 3′ |
| | ACCGAGTCGGTGCAGCCCCTTCGAGTA | Motif |
| | CCCACAGTACTACCTGGCAACATTGAC | [CGCGTCTCTACGTGGGGGCGCG |
| | GCGTCTCTACGTGGGGGCGCGTTTTTTT | (Sequence Number: 1850)], and |
| | (SEQ ID NO: 356) | transcription adaptations |
| 357 | GCTCAGCCAGGTAGTACTGTGTTTTAGA | pegRNA*1 (GGG-to-GGA PAM |
| | GCTAGAAATAGCAAGTTAAAATAAGGC | silencing edit); contains gRNA core |
| | TAGTCCGTTATCAACTTGAAAAAGTGGC | SEQ ID NO: 1854, Linker |
| | ACCGAGTCGGTGCAGCCCCTTCGAGTAT | [AACATTGA (Sequence Number: |
| | CCACAGTACTACCTGGCAACATTGACG | 1728)] + Univ. 3′ Motif |
| | CGTCTCTACGTGGGGGCGCGTTTTTTT | [CGCGTCTCTACGTGGGGGCGCG |
| | (SEQ ID NO: 357) | (Sequence Number: 1850)], and |
| | | transcription adaptations |
| 358 | GCTCAGCCAGGTAGTACTGTGTTTTAGA | pegRNA; contains gRNA core SEQ ID |
| | GCTAGAAATAGCAAGTTAAAATAAGGC | NO: 1854, and Linker [AACATTGA |
| | TAGTCCGTTATCAACTTGAAAAAGTGGC | (Sequence Number: 1728)] + Univ. 3′ |
| | ACCGAGTCGGTGCGTACGCAGCCCCTTC | Motif |
| | GAGTACCCACAGTACTACCTGGCTGAA | [CGCGTCTCTACGTGGGGGCGCG |
| | CATTGACGCGTCTCTACGTGGGGGCGC | (Sequence Number: 1850)] |
| | G (SEQ ID NO: 358) | |
| 359 | GCTCAGCCAGGTAGTACTGTGTTTTAGA | pegRNA; contains gRNA core SEQ ID |
| | GCTAGAAATAGCAAGTTAAAATAAGGC | NO: 1854, and Linker [AACATTGA |
| | TAGTCCGTTATCAACTTGAAAAAGTGGC | (Sequence Number: 1728)] + Univ. 3′ |
| | ACCGAGTCGGTGCTGGTACGCAGCCCC | Motif |
| | TTCGAGTACCCACAGTACTACCTGGCAA | [CGCGTCTCTACGTGGGGGCGCG |
| | CATTGACGCGTCTCTACGTGGGGGCGC | (Sequence Number: 1850)] |
| | G (SEQ ID NO: 359) | |
| 360 | GCTCAGCCAGGTAGTACTGTGTTTTAGA | pegRNA; contains gRNA core SEQ ID |
| | GCTAGAAATAGCAAGTTAAAATAAGGC | NO: 1854, and Linker [AACATTGA |
| | TAGTCCGTTATCAACTTGAAAAAGTGGC | (Sequence Number: 1728)] + Univ. 3′ |
| | ACCGAGTCGGTGCTGTGGTACGCAGCC | Motif |
| | CCTTCGAGTACCCACAGTACTACCTGAA | [CGCGTCTCTACGTGGGGGCGCG |
| | CATTGACGCGTCTCTACGTGGGGGCGC | (Sequence Number: 1850)] |
| | G (SEQ ID NO: 360) | |
| 361 | GCTCAGCCAGGTAGTACTGTGTTTAAGA | pegRNA; contains gRNA core SEQ ID |
| | GCGGGGAAATCCGCAAGTTTAAATAAG | NO: 1857, Linker [ATCTAT (Sequence |
| | GCTAGTCCGTTATCAGCGTGAAAACGC | Number: 1712)] + Univ. 3′ Motif |
| | GGCACCGAGTCGGTGCGCAGCCCCTTC | [CGGGTCTCTACGTGGGGGCCCG |
| | GAGTACCCACAGTACTACCTGGATCTAT | (Sequence Number: 1851)], and |
| | CGGGTCTCTACGTGGGGGCCCGTTTTTT | transcription adaptations |
| | T (SEQ ID NO: 361) | |
| 362 | GCTCAGCCAGGTAGTACTGTGTTTAAGA | pegRNA; contains gRNA core SEQ ID |
| | GCGGGGAAATCCGCAAGTTTAAATAAG | NO: 1857, Linker [AATTAT (Sequence |
| | GCTAGTCCGTTATCAGCGTGAAAACGC | Number: 1729)] + Univ. 3′ Motif |
| | GGCACCGAGTCGGTGCGCAGCCCCTTC | [CGGGTCTCTACGTGGGGGCCCG |
| | GAGTACCCACAGTACTACCTGGAATTAT | (Sequence Number: 1851)], and |
| | CGGGTCTCTACGTGGGGGCCCGTTTTTT | transcription adaptations |
| | T (SEQ ID NO: 362) | |
| 363 | GCTCAGCCAGGTAGTACTGTGTTTAAGA | pegRNA; contains gRNA core SEQ ID |
| | GCGGGGAAATCCGCAAGTTTAAATAAG | NO: 1857, Linker [ACATTC (Sequence |
| | GCTAGTCCGTTATCAGCGTGAAAACGC | Number: 1730)] + Univ. 3′ Motif |
| | GGCACCGAGTCGGTGCGCAGCCCCTTC | [GCGGCACCGTCCGCCCAAACGG |
| | GAGTACCCACAGTACTACCTGGACATTC | (Sequence Number: 1852)], and |
| | GCGGCACCGTCCGCCCAAACGGTTTTTT | transcription adaptations |
| | T (SEQ ID NO: 363) | |
| 364 | GCTCAGCCAGGTAGTACTGTGTTTAAGA | pegRNA; contains gRNA core SEQ ID |
| | GCGGGGAAATCCGCAAGTTTAAATAAG | NO: 1857, Linker [AGATTC (Sequence |
| | GCTAGTCCGTTATCAGCGTGAAAACGC | Number: 1731)] + Univ. 3′ Motif |
| | GGCACCGAGTCGGTGCGCAGCCCCTTC | [GCGGCACCGTCCGCCCAAACGG |
| | GAGTACCCACAGTACTACCTGGAGATT | (Sequence Number: 1852)], and |
| | CGCGGCACCGTCCGCCCAAACGGTTTTT | transcription adaptations |
| | TT (SEQ ID NO: 364) | |
| 365 | GCTCAGCCAGGTAGTACTGTGTTTAAGA | pegRNA*1 (GGG-to-GGA PAM |
| | GCGGGGAAATCCGCAAGTTTAAATAAG | silencing edit); contains gRNA core |
| | GCTAGTCCGTTATCAGCGTGAAAACGC | SEQ ID NO: 1857, Linker [TCCTAC |
| | GGCACCGAGTCGGTGCAGCCCCTTCGA | (Sequence Number: 1732)] + Univ. 3′ |
| | GTATCCACAGTACTACCTGGCTTCCTAC | Motif |
| | CGGGTCTCTACGTGGGGGCCCGTTTTTT | [CGGGTCTCTACGTGGGGGCCCG |
| | T (SEQ ID NO: 365) | (Sequence Number: 1851)], and |
| | | transcription adaptations |
| 366 | GCTCAGCCAGGTAGTACTGTGTTTAAGA | pegRNA*1 (GGG-to-GGA PAM |
| | GCGGGGAAATCCGCAAGTTTAAATAAG | silencing edit); contains gRNA core |
| | GCTAGTCCGTTATCAGCGTGAAAACGC | SEQ ID NO: 1857, Linker [ACTTAC |
| | GGCACCGAGTCGGTGCAGCCCCTTCGA | (Sequence Number: 1733)] + Univ. 3′ |
| | GTATCCACAGTACTACCTGGCTACTTAC | Motif |
| | CGGGTCTCTACGTGGGGGCCCGTTTTTT | [CGGGTCTCTACGTGGGGGCCCG |
| | T (SEQ ID NO: 366) | (Sequence Number: 1851)], and |
| | | transcription adaptations |
| 367 | GCTCAGCCAGGTAGTACTGTGTTTAAGA | pegRNA*1 (GGG-to-GGA PAM |
| | GCGGGGAAATCCGCAAGTTTAAATAAG | silencing edit); contains gRNA core |
| | GCTAGTCCGTTATCAGCGTGAAAACGC | SEQ ID NO: 1857, Linker [TTCAAT |
| | GGCACCGAGTCGGTGCAGCCCCTTCGA | (Sequence Number: 1734)] + Univ. 3′ |
| | GTATCCACAGTACTACCTGGCTTTCAAT | Motif |
| | GCGGCACCGTCCGCCCAAACGGTTTTTT | [GCGGCACCGTCCGCCCAAACGG |
| | T (SEQ ID NO: 367) | (Sequence Number: 1852)], and |
| | | transcription adaptations |
| 368 | GCTCAGCCAGGTAGTACTGTGTTTAAGA | pegRNA*1 (GGG-to-GGA PAM |
| | GCGGGGAAATCCGCAAGTTTAAATAAG | silencing edit); contains gRNA core |
| | GCTAGTCCGTTATCAGCGTGAAAACGC | SEQ ID NO: 1857, Linker [TTCTAT |
| | GGCACCGAGTCGGTGCAGCCCCTTCGA | (Sequence Number: 1676)] + Univ. 3′ |
| | GTATCCACAGTACTACCTGGCTTTCTAT | Motif |
| | GCGGCACCGTCCGCCCAAACGGTTTTTT | [GCGGCACCGTCCGCCCAAACGG |
| | T (SEQ ID NO: 368) | (Sequence Number: 1852)], and |
| | | transcription adaptations |
| 369 | GCTCAGCCAGGTAGTACTGTGTTTTAGA | pegRNA*1 (GGG-to-GGA PAM |
| | GCTAGAAATAGCAAGTTAAAATAAGGC | silencing edit); contains gRNA core |
| | TAGTCCGTTATCAACTTGAAAAAGTGGC | SEQ ID NO: 1854, Linker [TCTTCT |
| | ACCGAGTCGGTGCAGCCCCTTCGAGTAT | (Sequence Number: 1735)] + Univ. 3′ |
| | CCACAGTACTACCTGGCTGATCTTCTCG | Motif |
| | GGTCTCTACGTGGGGGCCCGTTTTTTT | [CGGGTCTCTACGTGGGGGCCCG |
| | (SEQ ID NO: 369) | (Sequence Number: 1851)], and |
| | | transcription adaptations |
| 370 | GCTCAGCCAGGTAGTACTGTGTTTAAGA | pegRNA*1 (GGG-to-GGA PAM |
| | GCTAGAAATAGCAAGTTTAAATAAGGC | silencing edit); contains gRNA core |
| | TAGTCCGTTATCAACTTGAAAAAGTGGC | SEQ ID NO: 1855, Linker [TCTTCT |
| | ACCGAGTCGGTGCAGCCCCTTCGAGTAT | (Sequence Number: 1735)] + Univ. 3′ |
| | CCACAGTACTACCTGGCTGATCTTCTCG | Motif |
| | GGTCTCTACGTGGGGGCCCGTTTTTTT | [CGGGTCTCTACGTGGGGGCCCG |
| | (SEQ ID NO: 370) | (Sequence Number: 1851)], and |
| | | transcription adaptations |
| 371 | GCTCAGCCAGGTAGTACTGTGTTTAAGA | pegRNA*1 (GGG-to-GGA PAM |
| | GCTAGAAATAGCAAGTTTAAATAAGGC | silencing edit); contains gRNA core |
| | TAGTCCGTTATCAGCGTGAAAACGCGG | SEQ ID NO: 1856, Linker [TCTTCT |
| | CACCGAGTCGGTGCAGCCCCTTCGAGT | (Sequence Number: 1735)] + Univ. 3′ |
| | ATCCACAGTACTACCTGGCTGATCTTCT | Motif |
| | CGGGTCTCTACGTGGGGGCCCGTTTTTT | [CGGGTCTCTACGTGGGGGCCCG |
| | T (SEQ ID NO: 371) | (Sequence Number: 1851)], and |
| | | transcription adaptations |
| 372 | GCTCAGCCAGGTAGTACTGTGTTTTAGA | pegRNA*1 (GGG-to-GGA PAM |
| | GCTAGAAATAGCAAGTTAAAATAAGGC | silencing edit); contains gRNA core |
| | TAGTCCGTTATCAACTTGAAAAAGTGGC | SEQ ID NO: 1854, Linker [ATTCTT |
| | ACCGAGTCGGTGCAGCCCCTTCGAGTAT | (Sequence Number: 1736)] + Univ. 3′ |
| | CCACAGTACTACCTGGCTGAATTCTTCG | Motif |
| | GGTCTCTACGTGGGGGCCCGTTTTTTT | [CGGGTCTCTACGTGGGGGCCCG |
| | (SEQ ID NO: 372) | (Sequence Number: 1851)], and |
| | | transcription adaptations |
| 373 | GCTCAGCCAGGTAGTACTGTGTTTAAGA | pegRNA*1 (GGG-to-GGA PAM |
| | GCTAGAAATAGCAAGTTTAAATAAGGC | silencing edit); contains gRNA core |
| | TAGTCCGTTATCAACTTGAAAAAGTGGC | SEQ ID NO: 1855, Linker [ATTCTT |
| | ACCGAGTCGGTGCAGCCCCTTCGAGTAT | (Sequence Number: 1736)] + Univ. 3′ |
| | CCACAGTACTACCTGGCTGAATTCTTCG | Motif |
| | GGTCTCTACGTGGGGGCCCGTTTTTTT | [CGGGTCTCTACGTGGGGGCCCG |
| | (SEQ ID NO: 373) | (Sequence Number: 1851)], and |
| | | transcription adaptations |
| 374 | GCTCAGCCAGGTAGTACTGTGTTTAAGA | pegRNA*1 (GGG-to-GGA PAM |
| | GCTAGAAATAGCAAGTTTAAATAAGGC | silencing edit); contains gRNA core |
| | TAGTCCGTTATCAGCGTGAAAACGCGG | SEQ ID NO: 1856, Linker [ATTCTT |
| | CACCGAGTCGGTGCAGCCCCTTCGAGT | (Sequence Number: 1736)] + Univ. 3′ |
| | ATCCACAGTACTACCTGGCTGAATTCTT | Motif |
| | CGGGTCTCTACGTGGGGGCCCGTTTTTT | [CGGGTCTCTACGTGGGGGCCCG |
| | T (SEQ ID NO: 374) | (Sequence Number: 1851)], and |
| | | transcription adaptations |
| 375 | GCTCAGCCAGGTAGTACTGTGTTTTAGA | pegRNA*1 (GGG-to-GGA PAM |
| | GCTAGAAATAGCAAGTTAAAATAAGGC | silencing edit); contains gRNA core |
| | TAGTCCGTTATCAACTTGAAAAAGTGGC | SEQ ID NO: 1854, Linker [AAAAAT |
| | ACCGAGTCGGTGCAGCCCCTTCGAGTAT | (Sequence Number: 1709)] + Univ. 3′ |
| | CCACAGTACTACCTGGCTGAAAAAATG | Motif |
| | CGGCACCGTCCGCCCAAACGGTTTTTTT | [GCGGCACCGTCCGCCCAAACGG |
| | (SEQ ID NO: 375) | (Sequence Number: 1852)], and |
| | | transcription adaptations |
| 376 | GCTCAGCCAGGTAGTACTGTGTTTAAGA | pegRNA*1 (GGG-to-GGA PAM |
| | GCTAGAAATAGCAAGTTTAAATAAGGC | silencing edit); contains gRNA core |
| | TAGTCCGTTATCAACTTGAAAAAGTGGC | SEQ ID NO: 1855, Linker [AAAAAT |
| | ACCGAGTCGGTGCAGCCCCTTCGAGTAT | (Sequence Number: 1709)] + Univ. 3′ |
| | CCACAGTACTACCTGGCTGAAAAAATG | Motif |
| | CGGCACCGTCCGCCCAAACGGTTTTTTT | [GCGGCACCGTCCGCCCAAACGG |
| | (SEQ ID NO: 376) | (Sequence Number: 1852)], and |
| | | transcription adaptations |
| 377 | GCTCAGCCAGGTAGTACTGTGTTTAAGA | pegRNA*1 (GGG-to-GGA PAM |
| | GCTAGAAATAGCAAGTTTAAATAAGGC | silencing edit); contains gRNA core |
| | TAGTCCGTTATCAGCGTGAAAACGCGG | SEQ ID NO: 1856, Linker [AAAAAT |
| | CACCGAGTCGGTGCAGCCCCTTCGAGT | (Sequence Number: 1709)] + Univ. 3′ |
| | ATCCACAGTACTACCTGGCTGAAAAAA | Motif |
| | TGCGGCACCGTCCGCCCAAACGGTTTTT | [GCGGCACCGTCCGCCCAAACGG |
| | TT (SEQ ID NO: 377) | (Sequence Number: 1852)], and |
| | | transcription adaptations |
| 378 | GCTCAGCCAGGTAGTACTGTGTTTTAGA | pegRNA*1 (GGG-to-GGA PAM |
| | GCTAGAAATAGCAAGTTAAAATAAGGC | silencing edit); contains gRNA core |
| | TAGTCCGTTATCAACTTGAAAAAGTGGC | SEQ ID NO: 1854, Linker [ATAAAT |
| | ACCGAGTCGGTGCAGCCCCTTCGAGTAT | (Sequence Number: 1724)] + Univ. 3′ |
| | CCACAGTACTACCTGGCTGAATAAATG | Motif |
| | CGGCACCGTCCGCCCAAACGGTTTTTTT | [GCGGCACCGTCCGCCCAAACGG |
| | (SEQ ID NO: 378) | (Sequence Number: 1852)], and |
| | | transcription adaptations |
| 379 | GCTCAGCCAGGTAGTACTGTGTTTAAGA | pegRNA*1 (GGG-to-GGA PAM |
| | GCTAGAAATAGCAAGTTTAAATAAGGC | silencing edit); contains gRNA core |
| | TAGTCCGTTATCAACTTGAAAAAGTGGC | SEQ ID NO: 1855, Linker [ATAAAT |
| | ACCGAGTCGGTGCAGCCCCTTCGAGTAT | (Sequence Number: 1724)] + Univ. 3′ |
| | CCACAGTACTACCTGGCTGAATAAATG | Motif |
| | CGGCACCGTCCGCCCAAACGGTTTTTTT | [GCGGCACCGTCCGCCCAAACGG |
| | (SEQ ID NO: 379) | (Sequence Number: 1852)], and |
| | | transcription adaptations |
| 380 | GCTCAGCCAGGTAGTACTGTGTTTAAGA | pegRNA*1 (GGG-to-GGA PAM |
| | GCTAGAAATAGCAAGTTTAAATAAGGC | silencing edit); contains gRNA core |
| | TAGTCCGTTATCAGCGTGAAAACGCGG | SEQ ID NO: 1856, Linker [ATAAAT |
| | CACCGAGTCGGTGCAGCCCCTTCGAGT | (Sequence Number: 1724)] + Univ. 3′ |
| | ATCCACAGTACTACCTGGCTGAATAAAT | Motif |
| | GCGGCACCGTCCGCCCAAACGGTTTTTT | [GCGGCACCGTCCGCCCAAACGG |
| | T (SEQ ID NO: 380) | (Sequence Number: 1852)], and |
| | | transcription adaptations |
| 381 | GCTCAGCCAGGTAGTACTGTGTTTTAGA | pegRNA; contains gRNA core SEQ ID |
| | GCTAGAAATAGCAAGTTAAAATAAGGC | NO: 1854, Linker [AACATTGA |
| | TAGTCCGTTATCAACTTGAAAAAGTGGC | (Sequence Number: 1728)] + Univ. 3′ |
| | ACCGAGTCGGTGCGCAGCCCCTTCGAG | Motif |
| | TACCCACAGTACTACCTGGAACATTGAC | [CGCGTCTCTACGTGGGGGCGCG |
| | GCGTCTCTACGTGGGGGCGCGTTTTTTT | (Sequence Number: 1850)], and |
| | (SEQ ID NO: 381) | transcription adaptations |
| 382 | GCTCAGCCAGGTAGTACTGTGTTTTAGA | pegRNA*1 (GGG-to-GGA PAM |
| | GCTAGAAATAGCAAGTTAAAATAAGGC | silencing edit); contains gRNA core |
| | TAGTCCGTTATCAACTTGAAAAAGTGGC | SEQ ID NO: 1854, Linker |
| | ACCGAGTCGGTGCAGCCCCTTCGAGTAT | [AACATTGA (Sequence Number: |
| | CCACAGTACTACCTGGCTAACATTGACG | 1728)] + Univ. 3′ Motif |
| | CGTCTCTACGTGGGGGCGCGTTTTTTT | [CGCGTCTCTACGTGGGGGCGCG |
| | (SEQ ID NO: 382) | (Sequence Number: 1850)], and |
| | | transcription adaptations |
| 383 | GCTCAGCCAGGTAGTACTGTGTTTTAGA | pegRNA; contains gRNA core SEQ ID |
| | GCTAGAAATAGCAAGTTAAAATAAGGC | NO: 1854, Linker [AACATTGA |
| | TAGTCCGTTATCAACTTGAAAAAGTGGC | (Sequence Number: 1728)] + Univ. 3′ |
| | ACCGAGTCGGTGCGCAGCCCCTTCGAG | Motif |
| | TACCCACAGTACTACCTGGCAACATTGA | [CGCGTCTCTACGTGGGGGCGCG |
| | CGCGTCTCTACGTGGGGGCGCGTTTTTT | (Sequence Number: 1850)], and |
| | T (SEQ ID NO: 383) | transcription adaptations |
| 384 | GCTCAGCCAGGTAGTACTGTGTTTTAGA | pegRNA*1 (GGG-to-GGA PAM |
| | GCTAGAAATAGCAAGTTAAAATAAGGC | silencing edit); contains gRNA core |
| | TAGTCCGTTATCAACTTGAAAAAGTGGC | SEQ ID NO: 1854, Linker |
| | ACCGAGTCGGTGCGCAGCCCCTTCGAG | [AACATTGA (Sequence Number: |
| | TATCCACAGTACTACCTGGCAACATTGA | 1728)] + Univ. 3′ Motif |
| | CGCGTCTCTACGTGGGGGCGCGTTTTTT | [CGCGTCTCTACGTGGGGGCGCG |
| | T (SEQ ID NO: 384) | (Sequence Number: 1850)], and |
| | | transcription adaptations |
| 385 | GCTCAGCCAGGTAGTACTGTGTTTTAGA | pegRNA*1 (GGG-to-GGA PAM |
| | GCTAGAAATAGCAAGTTAAAATAAGGC | silencing edit); contains gRNA core |
| | TAGTCCGTTATCAACTTGAAAAAGTGGC | SEQ ID NO: 1854, Linker |
| | ACCGAGTCGGTGCAGCCCCTTCGAGTAT | [AACATTGA (Sequence Number: |
| | CCACAGTACTACCTGGCTGAACATTGAC | 1728)] + Univ. 3′ Motif |
| | GCGTCTCTACGTGGGGGCGCGTTTTTTT | [CGCGTCTCTACGTGGGGGCGCG |
| | (SEQ ID NO: 385) | (Sequence Number: 1850)], and |
| | | transcription adaptations |
| 386 | GCTCAGCCAGGTAGTACTGTGTTTTAGA | pegRNA; contains gRNA core SEQ ID |
| | GCTAGAAATAGCAAGTTAAAATAAGGC | NO: 1854, and Linker [AACATTGA |
| | TAGTCCGTTATCAACTTGAAAAAGTGGC | (Sequence Number: 1728)] + Univ. 3′ |
| | ACCGAGTCGGTGCTGGTACGCAGCCCC | Motif |
| | TTCGAGTACCCACAGTACTACCTGGCTG | [CGCGTCTCTACGTGGGGGCGCG |
| | AACATTGACGCGTCTCTACGTGGGGGC | (Sequence Number: 1850)] |
| | GCG (SEQ ID NO: 386) | |
| 387 | GCTCAGCCAGGTAGTACTGTGTTTTAGA | pegRNA; contains gRNA core SEQ ID |
| | GCTAGAAATAGCAAGTTAAAATAAGGC | NO: 1854, and Linker [AACATTGA |
| | TAGTCCGTTATCAACTTGAAAAAGTGGC | (Sequence Number: 1728)] + Univ. 3′ |
| | ACCGAGTCGGTGCTGTGGTACGCAGCC | Motif |
| | CCTTCGAGTACCCACAGTACTACCTGGC | [CGCGTCTCTACGTGGGGGCGCG |
| | AACATTGACGCGTCTCTACGTGGGGGC | (Sequence Number: 1850)] |
| | GCG (SEQ ID NO: 387) | |
| 388 | GCTCAGCCAGGTAGTACTGTGTTTAAGA | pegRNA*1 (GGG-to-GGA PAM |
| | GCGGGGAAATCCGCAAGTTTAAATAAG | silencing edit); contains gRNA core |
| | GCTAGTCCGTTATCAGCGTGAAAACGC | SEQ ID NO: 1857, Linker [TCTTCT |
| | GGCACCGAGTCGGTGCAGCCCCTTCGA | (Sequence Number: 1735)] + Univ. 3′ |
| | GTATCCACAGTACTACCTGGCTGATCTT | Motif |
| | CTCGGGTCTCTACGTGGGGGCCCGTTTT | [CGGGTCTCTACGTGGGGGCCCG |
| | TTT (SEQ ID NO: 388) | (Sequence Number: 1851)], and |
| | | transcription adaptations |
| 389 | GCTCAGCCAGGTAGTACTGTGTTTAAGA | pegRNA*1 (GGG-to-GGA PAM |
| | GCGGGGAAATCCGCAAGTTTAAATAAG | silencing edit); contains gRNA core |
| | GCTAGTCCGTTATCAGCGTGAAAACGC | SEQ ID NO: 1857, Linker [ATTCTT |
| | GGCACCGAGTCGGTGCAGCCCCTTCGA | (Sequence Number: 1736)] + Univ. 3′ |
| | GTATCCACAGTACTACCTGGCTGAATTC | Motif |
| | TTCGGGTCTCTACGTGGGGGCCCGTTTT | [CGGGTCTCTACGTGGGGGCCCG |
| | TTT (SEQ ID NO: 389) | (Sequence Number: 1851)], and |
| | | transcription adaptations |
| 390 | GCTCAGCCAGGTAGTACTGTGTTTAAGA | pegRNA*1 (GGG-to-GGA PAM |
| | GCGGGGAAATCCGCAAGTTTAAATAAG | silencing edit); contains gRNA core |
| | GCTAGTCCGTTATCAGCGTGAAAACGC | SEQ ID NO: 1857, Linker [AAAAAT |
| | GGCACCGAGTCGGTGCAGCCCCTTCGA | (Sequence Number: 1709)] + Univ. 3′ |
| | GTATCCACAGTACTACCTGGCTGAAAA | Motif |
| | AATGCGGCACCGTCCGCCCAAACGGTT | [GCGGCACCGTCCGCCCAAACGG |
| | TTTTT (SEQ ID NO: 390) | (Sequence Number: 1852)], and |
| | | transcription adaptations |
| 391 | GCTCAGCCAGGTAGTACTGTGTTTAAGA | pegRNA*1 (GGG-to-GGA PAM |
| | GCGGGGAAATCCGCAAGTTTAAATAAG | silencing edit); contains gRNA core |
| | GCTAGTCCGTTATCAGCGTGAAAACGC | SEQ ID NO: 1857, Linker [ATAAAT |
| | GGCACCGAGTCGGTGCAGCCCCTTCGA | (Sequence Number: 1724)] + Univ. 3′ |
| | GTATCCACAGTACTACCTGGCTGAATAA | Motif |
| | ATGCGGCACCGTCCGCCCAAACGGTTTT | [GCGGCACCGTCCGCCCAAACGG |
| | TTT (SEQ ID NO: 391) | (Sequence Number: 1852)], and |
| | | transcription adaptations |
| 392 | GCTCAGCCAGGTAGTACTGTGTTTTAGA | pegRNA*1 (GGG-to-GGA PAM |
| | GCTAGAAATAGCAAGTTAAAATAAGGC | silencing edit); contains gRNA core |
| | TAGTCCGTTATCAACTTGAAAAAGTGGC | SEQ ID NO: 1854, Linker [TCATTT |
| | ACCGAGTCGGTGCGCAGCCCCTTCGAG | (Sequence Number: 1737)] + Univ. 3′ |
| | TATCCACAGTACTACCTGGCTGATCATT | Motif |
| | TCGGGTCTCTACGTGGGGGCCCGTTTTT | [CGGGTCTCTACGTGGGGGCCCG |
| | TT (SEQ ID NO: 392) | (Sequence Number: 1851)], and |
| | | transcription adaptations |
| 393 | GCTCAGCCAGGTAGTACTGTGTTTAAGA | pegRNA*1 (GGG-to-GGA PAM |
| | GCTAGAAATAGCAAGTTTAAATAAGGC | silencing edit); contains gRNA core |
| | TAGTCCGTTATCAACTTGAAAAAGTGGC | SEQ ID NO: 1855, Linker [TCATTT |
| | ACCGAGTCGGTGCGCAGCCCCTTCGAG | (Sequence Number: 1737)] + Univ. 3′ |
| | TATCCACAGTACTACCTGGCTGATCATT | Motif |
| | TCGGGTCTCTACGTGGGGGCCCGTTTTT | [CGGGTCTCTACGTGGGGGCCCG |
| | TT (SEQ ID NO: 393) | (Sequence Number: 1851)], and |
| | | transcription adaptations |
| 394 | GCTCAGCCAGGTAGTACTGTGTTTAAGA | pegRNA*1 (GGG-to-GGA PAM |
| | GCTAGAAATAGCAAGTTTAAATAAGGC | silencing edit); contains gRNA core |
| | TAGTCCGTTATCAGCGTGAAAACGCGG | SEQ ID NO: 1856, Linker [TCATTT |
| | CACCGAGTCGGTGCGCAGCCCCTTCGA | (Sequence Number: 1737)] + Univ. 3′ |
| | GTATCCACAGTACTACCTGGCTGATCAT | Motif |
| | TTCGGGTCTCTACGTGGGGGCCCGTTTT | [CGGGTCTCTACGTGGGGGCCCG |
| | TTT (SEQ ID NO: 394) | (Sequence Number: 1851)], and |
| | | transcription adaptations |
| 395 | GCTCAGCCAGGTAGTACTGTGTTTTAGA | pegRNA*1 (GGG-to-GGA PAM |
| | GCTAGAAATAGCAAGTTAAAATAAGGC | silencing edit); contains gRNA core |
| | TAGTCCGTTATCAACTTGAAAAAGTGGC | SEQ ID NO: 1854, Linker [TATCTT |
| | ACCGAGTCGGTGCGCAGCCCCTTCGAG | (Sequence Number: 1738)] + Univ. 3′ |
| | TATCCACAGTACTACCTGGCTGATATCT | Motif |
| | TCGGGTCTCTACGTGGGGGCCCGTTTTT | [CGGGTCTCTACGTGGGGGCCCG |
| | TT (SEQ ID NO: 395) | (Sequence Number: 1851)], and |
| | | transcription adaptations |
| 396 | GCTCAGCCAGGTAGTACTGTGTTTAAGA | pegRNA*1 (GGG-to-GGA PAM |
| | GCTAGAAATAGCAAGTTTAAATAAGGC | silencing edit); contains gRNA core |
| | TAGTCCGTTATCAACTTGAAAAAGTGGC | SEQ ID NO: 1855, Linker [TATCTT |
| | ACCGAGTCGGTGCGCAGCCCCTTCGAG | (Sequence Number: 1738)] + Univ. 3′ |
| | TATCCACAGTACTACCTGGCTGATATCT | Motif |
| | TCGGGTCTCTACGTGGGGGCCCGTTTTT | [CGGGTCTCTACGTGGGGGCCCG |
| | TT (SEQ ID NO: 396) | (Sequence Number: 1851)], and |
| | | transcription adaptations |
| 397 | GCTCAGCCAGGTAGTACTGTGTTTAAGA | pegRNA*1 (GGG-to-GGA PAM |
| | GCTAGAAATAGCAAGTTTAAATAAGGC | silencing edit); contains gRNA core |
| | TAGTCCGTTATCAGCGTGAAAACGCGG | SEQ ID NO: 1856, Linker [TATCTT |
| | CACCGAGTCGGTGCGCAGCCCCTTCGA | (Sequence Number: 1738)] + Univ. 3′ |
| | GTATCCACAGTACTACCTGGCTGATATC | Motif |
| | TTCGGGTCTCTACGTGGGGGCCCGTTTT | [CGGGTCTCTACGTGGGGGCCCG |
| | TTT (SEQ ID NO: 397) | (Sequence Number: 1851)], and |
| | | transcription adaptations |
| 398 | GCTCAGCCAGGTAGTACTGTGTTTTAGA | pegRNA*1 (GGG-to-GGA PAM |
| | GCTAGAAATAGCAAGTTAAAATAAGGC | silencing edit); contains gRNA core |
| | TAGTCCGTTATCAACTTGAAAAAGTGGC | SEQ ID NO: 1854, Linker [ATAAAA |
| | ACCGAGTCGGTGCGCAGCCCCTTCGAG | (Sequence Number: 1710)] + Univ. 3′ |
| | TATCCACAGTACTACCTGGCTGAATAAA | Motif |
| | AGCGGCACCGTCCGCCCAAACGGTTTTT | [GCGGCACCGTCCGCCCAAACGG |
| | TT (SEQ ID NO: 398) | (Sequence Number: 1852)], and |
| | | transcription adaptations |
| 399 | GCTCAGCCAGGTAGTACTGTGTTTAAGA | pegRNA*1 (GGG-to-GGA PAM |
| | GCTAGAAATAGCAAGTTTAAATAAGGC | silencing edit); contains gRNA core |
| | TAGTCCGTTATCAACTTGAAAAAGTGGC | SEQ ID NO: 1855, Linker [ATAAAA |
| | ACCGAGTCGGTGCGCAGCCCCTTCGAG | (Sequence Number: 1710)] + Univ. 3′ |
| | TATCCACAGTACTACCTGGCTGAATAAA | Motif |
| | AGCGGCACCGTCCGCCCAAACGGTTTTT | [GCGGCACCGTCCGCCCAAACGG |
| | TT (SEQ ID NO: 399) | (Sequence Number: 1852)], and |
| | | transcription adaptations |
| 400 | GCTCAGCCAGGTAGTACTGTGTTTAAGA | pegRNA*1 (GGG-to-GGA PAM |
| | GCTAGAAATAGCAAGTTTAAATAAGGC | silencing edit); contains gRNA core |
| | TAGTCCGTTATCAGCGTGAAAACGCGG | SEQ ID NO: 1856, Linker [ATAAAA |
| | CACCGAGTCGGTGCGCAGCCCCTTCGA | (Sequence Number: 1710)] + Univ. 3′ |
| | GTATCCACAGTACTACCTGGCTGAATAA | Motif |
| | AAGCGGCACCGTCCGCCCAAACGGTTT | [GCGGCACCGTCCGCCCAAACGG |
| | TTTT (SEQ ID NO: 400) | (Sequence Number: 1852)], and |
| | | transcription adaptations |
| 401 | GCTCAGCCAGGTAGTACTGTGTTTTAGA | pegRNA*1 (GGG-to-GGA PAM |
| | GCTAGAAATAGCAAGTTAAAATAAGGC | silencing edit); contains gRNA core |
| | TAGTCCGTTATCAACTTGAAAAAGTGGC | SEQ ID NO: 1854, Linker [AATAAA |
| | ACCGAGTCGGTGCGCAGCCCCTTCGAG | (Sequence Number: 1651)] + Univ. 3′ |
| | TATCCACAGTACTACCTGGCTGAAATAA | Motif |
| | AGCGGCACCGTCCGCCCAAACGGTTTTT | [GCGGCACCGTCCGCCCAAACGG |
| | TT (SEQ ID NO: 401) | (Sequence Number: 1852)], and |
| | | transcription adaptations |
| 402 | GCTCAGCCAGGTAGTACTGTGTTTAAGA | pegRNA*1 (GGG-to-GGA PAM |
| | GCTAGAAATAGCAAGTTTAAATAAGGC | silencing edit); contains gRNA core |
| | TAGTCCGTTATCAACTTGAAAAAGTGGC | SEQ ID NO: 1855, Linker [AATAAA |
| | ACCGAGTCGGTGCGCAGCCCCTTCGAG | (Sequence Number: 1651)] + Univ. 3′ |
| | TATCCACAGTACTACCTGGCTGAAATAA | Motif |
| | AGCGGCACCGTCCGCCCAAACGGTTTTT | [GCGGCACCGTCCGCCCAAACGG |
| | TT (SEQ ID NO: 402) | (Sequence Number: 1852)], and |
| | | transcription adaptations |
| 403 | GCTCAGCCAGGTAGTACTGTGTTTAAGA | pegRNA*1 (GGG-to-GGA PAM |
| | GCTAGAAATAGCAAGTTTAAATAAGGC | silencing edit); contains gRNA core |
| | TAGTCCGTTATCAGCGTGAAAACGCGG | SEQ ID NO: 1856, Linker [AATAAA |
| | CACCGAGTCGGTGCGCAGCCCCTTCGA | (Sequence Number: 1651)] + Univ. 3′ |
| | GTATCCACAGTACTACCTGGCTGAAATA | Motif |
| | AAGCGGCACCGTCCGCCCAAACGGTTT | [GCGGCACCGTCCGCCCAAACGG |
| | TTTT (SEQ ID NO: 403) | (Sequence Number: 1852)], and |
| | | transcription adaptations |
| 404 | GCTCAGCCAGGTAGTACTGTGTTTTAGA | pegRNA*1 (GGG-to-GGA PAM |
| | GCTAGAAATAGCAAGTTAAAATAAGGC | silencing edit); contains gRNA core |
| | TAGTCCGTTATCAACTTGAAAAAGTGGC | SEQ ID NO: 1854, Linker |
| | ACCGAGTCGGTGCGCAGCCCCTTCGAG | [AACATTGA (Sequence Number: |
| | TATCCACAGTACTACCTGGCTAACATTG | 1728)] + Univ. 3′ Motif |
| | ACGCGTCTCTACGTGGGGGCGCGTTTTT | [CGCGTCTCTACGTGGGGGCGCG |
| | TT (SEQ ID NO: 404) | (Sequence Number: 1850)], and |
| | | transcription adaptations |
| 405 | GCTCAGCCAGGTAGTACTGTGTTTTAGA | pegRNA; contains gRNA core SEQ ID |
| | GCTAGAAATAGCAAGTTAAAATAAGGC | NO: 1854, Linker [AACATTGA |
| | TAGTCCGTTATCAACTTGAAAAAGTGGC | (Sequence Number: 1728)] + Univ. 3′ |
| | ACCGAGTCGGTGCAGCCCCTTCGAGTA | Motif |
| | CCCACAGTACTACCTGGCTGAAACATTG | [CGCGTCTCTACGTGGGGGCGCG |
| | ACGCGTCTCTACGTGGGGGCGCGTTTTT | (Sequence Number: 1850)], and |
| | TT (SEQ ID NO: 405) | transcription adaptations |
| 406 | GCTCAGCCAGGTAGTACTGTGTTTTAGA | pegRNA*1 (GGG-to-GGA PAM |
| | GCTAGAAATAGCAAGTTAAAATAAGGC | silencing edit); contains gRNA core |
| | TAGTCCGTTATCAACTTGAAAAAGTGGC | SEQ ID NO: 1854, Linker |
| | ACCGAGTCGGTGCAGCCCCTTCGAGTAT | [AACATTGA (Sequence Number: |
| | CCACAGTACTACCTGGCTGAAACATTG | 1728)] + Univ. 3′ Motif |
| | ACGCGTCTCTACGTGGGGGCGCGTTTTT | [CGCGTCTCTACGTGGGGGCGCG |
| | TT (SEQ ID NO: 406) | (Sequence Number: 1850)], and |
| | | transcription adaptations |
| 407 | GCTCAGCCAGGTAGTACTGTGTTTTAGA | pegRNA*1 (GGG-to-GGA PAM |
| | GCTAGAAATAGCAAGTTAAAATAAGGC | silencing edit); contains gRNA core |
| | TAGTCCGTTATCAACTTGAAAAAGTGGC | SEQ ID NO: 1854, Linker |
| | ACCGAGTCGGTGCGCAGCCCCTTCGAG | [AACATTGA (Sequence Number: |
| | TATCCACAGTACTACCTGGCTGAACATT | 1728)] + Univ. 3′ Motif |
| | GACGCGTCTCTACGTGGGGGCGCGTTTT | [CGCGTCTCTACGTGGGGGCGCG |
| | TTT (SEQ ID NO: 407) | (Sequence Number: 1850)], and |
| | | transcription adaptations |
| 408 | GCTCAGCCAGGTAGTACTGTGTTTTAGA | pegRNA; contains gRNA core SEQ ID |
| | GCTAGAAATAGCAAGTTAAAATAAGGC | NO: 1854, and Linker [AACATTGA |
| | TAGTCCGTTATCAACTTGAAAAAGTGGC | (Sequence Number: 1728)] + Univ. 3′ |
| | ACCGAGTCGGTGCTGTGGTACGCAGCC | Motif |
| | CCTTCGAGTACCCACAGTACTACCTGGC | [CGCGTCTCTACGTGGGGGCGCG |
| | TGAACATTGACGCGTCTCTACGTGGGG | (Sequence Number: 1850)] |
| | GCGCG (SEQ ID NO: 408) | |
| 409 | GCTCAGCCAGGTAGTACTGTGTTTAAGA | pegRNA*1 (GGG-to-GGA PAM |
| | GCGGGGAAATCCGCAAGTTTAAATAAG | silencing edit); contains gRNA core |
| | GCTAGTCCGTTATCAGCGTGAAAACGC | SEQ ID NO: 1857, Linker [TCATTT |
| | GGCACCGAGTCGGTGCGCAGCCCCTTC | (Sequence Number: 1737)] + Univ. 3′ |
| | GAGTATCCACAGTACTACCTGGCTGATC | Motif |
| | ATTTCGGGTCTCTACGTGGGGGCCCGTT | [CGGGTCTCTACGTGGGGGCCCG |
| | TTTTT (SEQ ID NO: 409) | (Sequence Number: 1851)], and |
| | | transcription adaptations |
| 410 | GCTCAGCCAGGTAGTACTGTGTTTAAGA | pegRNA*1 (GGG-to-GGA PAM |
| | GCGGGGAAATCCGCAAGTTTAAATAAG | silencing edit); contains gRNA core |
| | GCTAGTCCGTTATCAGCGTGAAAACGC | SEQ ID NO: 1857, Linker [TATCTT |
| | GGCACCGAGTCGGTGCGCAGCCCCTTC | (Sequence Number: 1738)] + Univ. 3′ |
| | GAGTATCCACAGTACTACCTGGCTGATA | Motif |
| | TCTTCGGGTCTCTACGTGGGGGCCCGTT | [CGGGTCTCTACGTGGGGGCCCG |
| | TTTTT (SEQ ID NO: 410) | (Sequence Number: 1851)], and |
| | | transcription adaptations |
| 411 | GCTCAGCCAGGTAGTACTGTGTTTAAGA | pegRNA*1 (GGG-to-GGA PAM |
| | GCGGGGAAATCCGCAAGTTTAAATAAG | silencing edit); contains gRNA core |
| | GCTAGTCCGTTATCAGCGTGAAAACGC | SEQ ID NO: 1857, Linker [ATAAAA |
| | GGCACCGAGTCGGTGCGCAGCCCCTTC | (Sequence Number: 1710)] + Univ. 3′ |
| | GAGTATCCACAGTACTACCTGGCTGAAT | Motif |
| | AAAAGCGGCACCGTCCGCCCAAACGGT | [GCGGCACCGTCCGCCCAAACGG |
| | TTTTTT (SEQ ID NO: 411) | (Sequence Number: 1852)], and |
| | | transcription adaptations |
| 412 | GCTCAGCCAGGTAGTACTGTGTTTAAGA | pegRNA*1 (GGG-to-GGA PAM |
| | GCGGGGAAATCCGCAAGTTTAAATAAG | silencing edit); contains gRNA core |
| | GCTAGTCCGTTATCAGCGTGAAAACGC | SEQ ID NO: 1857, Linker [AATAAA |
| | GGCACCGAGTCGGTGCGCAGCCCCTTC | (Sequence Number: 1651)] + Univ. 3′ |
| | GAGTATCCACAGTACTACCTGGCTGAA | Motif |
| | ATAAAGCGGCACCGTCCGCCCAAACGG | [GCGGCACCGTCCGCCCAAACGG |
| | TTTTTTT (SEQ ID NO: 412) | (Sequence Number: 1852)], and |
| | | transcription adaptations |
| 413 | GCTCAGCCAGGTAGTACTGTGTTTTAGA | pegRNA*1 (GGG-to-GGA PAM |
| | GCTAGAAATAGCAAGTTAAAATAAGGC | silencing edit); contains gRNA core |
| | TAGTCCGTTATCAACTTGAAAAAGTGGC | SEQ ID NO: 1854, Linker |
| | ACCGAGTCGGTGCGCAGCCCCTTCGAG | [AACATTGA (Sequence Number: |
| | TATCCACAGTACTACCTGGCTGAAACAT | 1728)] + Univ. 3′ Motif |
| | TGACGCGTCTCTACGTGGGGGCGCGTTT | [CGCGTCTCTACGTGGGGGCGCG |
| | TTTT (SEQ ID NO: 413) | (Sequence Number: 1850)], and |
| | | transcription adaptations |
| 414 | GCTCAGCCAGGTAGTACTGTGTTTAAGA | pegRNA; contains gRNA core SEQ ID |
| | GCTATGCTGGAAACAGCATAGCAAGTT | NO: 1858, Linker [ATCTAT (Sequence |
| | TAAATAAGGCTAGTCCGTTATCAACTTG | Number: 1712)] + Univ. 3′ Motif |
| | AAAAAGTGGCACCGAGTCGGTGCGCAG | [CGGGTCTCTACGTGGGGGCCCG |
| | CCCCTTCGAGTACCCACAGTACTACCTG | (Sequence Number: 1851)], and |
| | GATCTATCGGGTCTCTACGTGGGGGCCC | transcription adaptations |
| | GTTTTTTT (SEQ ID NO: 414) | |
| 415 | GCTCAGCCAGGTAGTACTGTGTTTAAGA | pegRNA; contains gRNA core SEQ ID |
| | GCTATGCTGGAAACAGCATAGCAAGTT | NO: 1859, Linker [ATCTAT (Sequence |
| | TAAATAAGGCTAGTCCGTTATCAGCGTG | Number: 1712)] + Univ. 3′ Motif |
| | AAAACGCGGCACCGAGTCGGTGCGCAG | [CGGGTCTCTACGTGGGGGCCCG |
| | CCCCTTCGAGTACCCACAGTACTACCTG | (Sequence Number: 1851)], and |
| | GATCTATCGGGTCTCTACGTGGGGGCCC | transcription adaptations |
| | GTTTTTTT (SEQ ID NO: 415) | |
| 416 | GCTCAGCCAGGTAGTACTGTGTTTAAGA | pegRNA; contains gRNA core SEQ ID |
| | GCTATGCTGGAAACAGCATAGCAAGTT | NO: 1858, Linker [AATTAT (Sequence |
| | TAAATAAGGCTAGTCCGTTATCAACTTG | Number: 1729)] + Univ. 3′ Motif |
| | AAAAAGTGGCACCGAGTCGGTGCGCAG | [CGGGTCTCTACGTGGGGGCCCG |
| | CCCCTTCGAGTACCCACAGTACTACCTG | (Sequence Number: 1851)], and |
| | GAATTATCGGGTCTCTACGTGGGGGCCC | transcription adaptations |
| | GTTTTTTT (SEQ ID NO: 416) | |
| 417 | GCTCAGCCAGGTAGTACTGTGTTTAAGA | pegRNA; contains gRNA core SEQ ID |
| | GCTATGCTGGAAACAGCATAGCAAGTT | NO: 1859, Linker [AATTAT (Sequence |
| | TAAATAAGGCTAGTCCGTTATCAGCGTG | Number: 1729)] + Univ. 3′ Motif |
| | AAAACGCGGCACCGAGTCGGTGCGCAG | [CGGGTCTCTACGTGGGGGCCCG |
| | CCCCTTCGAGTACCCACAGTACTACCTG | (Sequence Number: 1851)], and |
| | GAATTATCGGGTCTCTACGTGGGGGCCC | transcription adaptations |
| | GTTTTTTT (SEQ ID NO: 417) | |
| 418 | GCTCAGCCAGGTAGTACTGTGTTTAAGA | pegRNA; contains gRNA core SEQ ID |
| | GCTATGCTGGAAACAGCATAGCAAGTT | NO: 1858, Linker [ACATTC (Sequence |
| | TAAATAAGGCTAGTCCGTTATCAACTTG | Number: 1730)] + Univ. 3′ Motif |
| | AAAAAGTGGCACCGAGTCGGTGCGCAG | [GCGGCACCGTCCGCCCAAACGG |
| | CCCCTTCGAGTACCCACAGTACTACCTG | (Sequence Number: 1852)], and |
| | GACATTCGCGGCACCGTCCGCCCAAAC | transcription adaptations |
| | GGTTTTTTT (SEQ ID NO: 418) | |
| 419 | GCTCAGCCAGGTAGTACTGTGTTTAAGA | pegRNA; contains gRNA core SEQ ID |
| | GCTATGCTGGAAACAGCATAGCAAGTT | NO: 1859, Linker [ACATTC (Sequence |
| | TAAATAAGGCTAGTCCGTTATCAGCGTG | Number: 1730)] + Univ. 3′ Motif |
| | AAAACGCGGCACCGAGTCGGTGCGCAG | [GCGGCACCGTCCGCCCAAACGG |
| | CCCCTTCGAGTACCCACAGTACTACCTG | (Sequence Number: 1852)], and |
| | GACATTCGCGGCACCGTCCGCCCAAAC | transcription adaptations |
| | GGTTTTTTT (SEQ ID NO: 419) | |
| 420 | GCTCAGCCAGGTAGTACTGTGTTTAAGA | pegRNA; contains gRNA core SEQ ID |
| | GCTATGCTGGAAACAGCATAGCAAGTT | NO: 1858, Linker [AGATTC (Sequence |
| | TAAATAAGGCTAGTCCGTTATCAACTTG | Number: 1731)] + Univ. 3′ Motif |
| | AAAAAGTGGCACCGAGTCGGTGCGCAG | [GCGGCACCGTCCGCCCAAACGG |
| | CCCCTTCGAGTACCCACAGTACTACCTG | (Sequence Number: 1852)], and |
| | GAGATTCGCGGCACCGTCCGCCCAAAC | transcription adaptations |
| | GGTTTTTTT (SEQ ID NO: 420) | |
| 421 | GCTCAGCCAGGTAGTACTGTGTTTAAGA | pegRNA; contains gRNA core SEQ ID |
| | GCTATGCTGGAAACAGCATAGCAAGTT | NO: 1859, Linker [AGATTC (Sequence |
| | TAAATAAGGCTAGTCCGTTATCAGCGTG | Number: 1731)] + Univ. 3′ Motif |
| | AAAACGCGGCACCGAGTCGGTGCGCAG | [GCGGCACCGTCCGCCCAAACGG |
| | CCCCTTCGAGTACCCACAGTACTACCTG | (Sequence Number: 1852)], and |
| | GAGATTCGCGGCACCGTCCGCCCAAAC | transcription adaptations |
| | GGTTTTTTT (SEQ ID NO: 421) | |
| 422 | GCTCAGCCAGGTAGTACTGTGTTTAAGA | pegRNA*1 (GGG-to-GGA PAM |
| | GCTATGCTGGAAACAGCATAGCAAGTT | silencing edit); contains gRNA core |
| | TAAATAAGGCTAGTCCGTTATCAACTTG | SEQ ID NO: 1858, Linker [TCCTAC |
| | AAAAAGTGGCACCGAGTCGGTGCAGCC | (Sequence Number: 1732)] + Univ. 3′ |
| | CCTTCGAGTATCCACAGTACTACCTGGC | Motif |
| | TTCCTACCGGGTCTCTACGTGGGGGCCC | [CGGGTCTCTACGTGGGGGCCCG |
| | GTTTTTTT (SEQ ID NO: 422) | (Sequence Number: 1851)], and |
| | | transcription adaptations |
| 423 | GCTCAGCCAGGTAGTACTGTGTTTAAGA | pegRNA*1 (GGG-to-GGA PAM |
| | GCTATGCTGGAAACAGCATAGCAAGTT | silencing edit); contains gRNA core |
| | TAAATAAGGCTAGTCCGTTATCAGCGTG | SEQ ID NO: 1859, Linker [TCCTAC |
| | AAAACGCGGCACCGAGTCGGTGCAGCC | (Sequence Number: 1732)] + Univ. 3′ |
| | CCTTCGAGTATCCACAGTACTACCTGGC | Motif |
| | TTCCTACCGGGTCTCTACGTGGGGGCCC | [CGGGTCTCTACGTGGGGGCCCG |
| | GTTTTTTT (SEQ ID NO: 423) | (Sequence Number: 1851)], and |
| | | transcription adaptations |
| 424 | GCTCAGCCAGGTAGTACTGTGTTTAAGA | pegRNA*1 (GGG-to-GGA PAM |
| | GCTATGCTGGAAACAGCATAGCAAGTT | silencing edit); contains gRNA core |
| | TAAATAAGGCTAGTCCGTTATCAACTTG | SEQ ID NO: 1858, Linker [ACTTAC |
| | AAAAAGTGGCACCGAGTCGGTGCAGCC | (Sequence Number: 1733)] + Univ. 3′ |
| | CCTTCGAGTATCCACAGTACTACCTGGC | Motif |
| | TACTTACCGGGTCTCTACGTGGGGGCCC | [CGGGTCTCTACGTGGGGGCCCG |
| | GTTTTTTT (SEQ ID NO: 424) | (Sequence Number: 1851)], and |
| | | transcription adaptations |
| 425 | GCTCAGCCAGGTAGTACTGTGTTTAAGA | pegRNA*1 (GGG-to-GGA PAM |
| | GCTATGCTGGAAACAGCATAGCAAGTT | silencing edit); contains gRNA core |
| | TAAATAAGGCTAGTCCGTTATCAGCGTG | SEQ ID NO: 1859, Linker [ACTTAC |
| | AAAACGCGGCACCGAGTCGGTGCAGCC | (Sequence Number: 1733)] + Univ. 3′ |
| | CCTTCGAGTATCCACAGTACTACCTGGC | Motif |
| | TACTTACCGGGTCTCTACGTGGGGGCCC | [CGGGTCTCTACGTGGGGGCCCG |
| | GTTTTTTT (SEQ ID NO: 425) | (Sequence Number: 1851)], and |
| | | transcription adaptations |
| 426 | GCTCAGCCAGGTAGTACTGTGTTTAAGA | pegRNA*1 (GGG-to-GGA PAM |
| | GCTATGCTGGAAACAGCATAGCAAGTT | silencing edit); contains gRNA core |
| | TAAATAAGGCTAGTCCGTTATCAACTTG | SEQ ID NO: 1858, Linker [TTCAAT |
| | AAAAAGTGGCACCGAGTCGGTGCAGCC | (Sequence Number: 1734)] + Univ. 3′ |
| | CCTTCGAGTATCCACAGTACTACCTGGC | Motif |
| | TTTCAATGCGGCACCGTCCGCCCAAACG | [GCGGCACCGTCCGCCCAAACGG |
| | GTTTTTTT (SEQ ID NO: 426) | (Sequence Number: 1852)], and |
| | | transcription adaptations |
| 427 | GCTCAGCCAGGTAGTACTGTGTTTAAGA | pegRNA*1 (GGG-to-GGA PAM |
| | GCTATGCTGGAAACAGCATAGCAAGTT | silencing edit); contains gRNA core |
| | TAAATAAGGCTAGTCCGTTATCAGCGTG | SEQ ID NO: 1859, Linker [TTCAAT |
| | AAAACGCGGCACCGAGTCGGTGCAGCC | (Sequence Number: 1734)] + Univ. 3′ |
| | CCTTCGAGTATCCACAGTACTACCTGGC | Motif |
| | TTTCAATGCGGCACCGTCCGCCCAAACG | [GCGGCACCGTCCGCCCAAACGG |
| | GTTTTTTT (SEQ ID NO: 427) | (Sequence Number: 1852)], and |
| | | transcription adaptations |
| 428 | GCTCAGCCAGGTAGTACTGTGTTTAAGA | pegRNA*1 (GGG-to-GGA PAM |
| | GCTATGCTGGAAACAGCATAGCAAGTT | silencing edit); contains gRNA core |
| | TAAATAAGGCTAGTCCGTTATCAACTTG | SEQ ID NO: 1858, Linker [TTCTAT |
| | AAAAAGTGGCACCGAGTCGGTGCAGCC | (Sequence Number: 1676)] + Univ. 3′ |
| | CCTTCGAGTATCCACAGTACTACCTGGC | Motif |
| | TTTCTATGCGGCACCGTCCGCCCAAACG | [GCGGCACCGTCCGCCCAAACGG |
| | GTTTTTTT (SEQ ID NO: 428) | (Sequence Number: 1852)], and |
| | | transcription adaptations |
| 429 | GCTCAGCCAGGTAGTACTGTGTTTAAGA | pegRNA*1 (GGG-to-GGA PAM |
| | GCTATGCTGGAAACAGCATAGCAAGTT | silencing edit); contains gRNA core |
| | TAAATAAGGCTAGTCCGTTATCAGCGTG | SEQ ID NO: 1859, Linker [TTCTAT |
| | AAAACGCGGCACCGAGTCGGTGCAGCC | (Sequence Number: 1676)] + Univ. 3′ |
| | CCTTCGAGTATCCACAGTACTACCTGGC | Motif |
| | TTTCTATGCGGCACCGTCCGCCCAAACG | [GCGGCACCGTCCGCCCAAACGG |
| | GTTTTTTT (SEQ ID NO: 429) | (Sequence Number: 1852)], and |
| | | transcription adaptations |
| 430 | GCTCAGCCAGGTAGTACTGTGTTTAAGA | pegRNA*1 (GGG-to-GGA PAM |
| | GCTATGCTGGAAACAGCATAGCAAGTT | silencing edit); contains gRNA core |
| | TAAATAAGGCTAGTCCGTTATCAACTTG | SEQ ID NO: 1858, Linker [TCTTCT |
| | AAAAAGTGGCACCGAGTCGGTGCAGCC | (Sequence Number: 1735)] + Univ. 3′ |
| | CCTTCGAGTATCCACAGTACTACCTGGC | Motif |
| | TGATCTTCTCGGGTCTCTACGTGGGGGC | [CGGGTCTCTACGTGGGGGCCCG |
| | CCGTTTTTTT (SEQ ID NO: 430) | (Sequence Number: 1851)], and |
| | | transcription adaptations |
| 431 | GCTCAGCCAGGTAGTACTGTGTTTAAGA | pegRNA*1 (GGG-to-GGA PAM |
| | GCTATGCTGGAAACAGCATAGCAAGTT | silencing edit); contains gRNA core |
| | TAAATAAGGCTAGTCCGTTATCAGCGTG | SEQ ID NO: 1859, Linker [TCTTCT |
| | AAAACGCGGCACCGAGTCGGTGCAGCC | (Sequence Number: 1735)] + Univ. 3′ |
| | CCTTCGAGTATCCACAGTACTACCTGGC | Motif |
| | TGATCTTCTCGGGTCTCTACGTGGGGGC | [CGGGTCTCTACGTGGGGGCCCG |
| | CCGTTTTTTT (SEQ ID NO: 431) | (Sequence Number: 1851)], and |
| | | transcription adaptations |
| 432 | GCTCAGCCAGGTAGTACTGTGTTTAAGA | pegRNA*1 (GGG-to-GGA PAM |
| | GCTATGCTGGAAACAGCATAGCAAGTT | silencing edit); contains gRNA core |
| | TAAATAAGGCTAGTCCGTTATCAACTTG | SEQ ID NO: 1858, Linker [ATTCTT |
| | AAAAAGTGGCACCGAGTCGGTGCAGCC | (Sequence Number: 1736)] + Univ. 3′ |
| | CCTTCGAGTATCCACAGTACTACCTGGC | Motif |
| | TGAATTCTTCGGGTCTCTACGTGGGGGC | [CGGGTCTCTACGTGGGGGCCCG |
| | CCGTTTTTTT (SEQ ID NO: 432) | (Sequence Number: 1851)], and |
| | | transcription adaptations |
| 433 | GCTCAGCCAGGTAGTACTGTGTTTAAGA | pegRNA*1 (GGG-to-GGA PAM |
| | GCTATGCTGGAAACAGCATAGCAAGTT | silencing edit); contains gRNA core |
| | TAAATAAGGCTAGTCCGTTATCAGCGTG | SEQ ID NO: 1859, Linker [ATTCTT |
| | AAAACGCGGCACCGAGTCGGTGCAGCC | (Sequence Number: 1736)] + Univ. 3′ |
| | CCTTCGAGTATCCACAGTACTACCTGGC | Motif |
| | TGAATTCTTCGGGTCTCTACGTGGGGGC | [CGGGTCTCTACGTGGGGGCCCG |
| | CCGTTTTTTT (SEQ ID NO: 433) | (Sequence Number: 1851)], and |
| | | transcription adaptations |
| 434 | GCTCAGCCAGGTAGTACTGTGTTTAAGA | pegRNA*1 (GGG-to-GGA PAM |
| | GCTATGCTGGAAACAGCATAGCAAGTT | silencing edit); contains gRNA core |
| | TAAATAAGGCTAGTCCGTTATCAACTTG | SEQ ID NO: 1858, Linker [AAAAAT |
| | AAAAAGTGGCACCGAGTCGGTGCAGCC | (Sequence Number: 1709)] + Univ. 3′ |
| | CCTTCGAGTATCCACAGTACTACCTGGC | Motif |
| | TGAAAAAATGCGGCACCGTCCGCCCAA | [GCGGCACCGTCCGCCCAAACGG |
| | ACGGTTTTTTT (SEQ ID NO: 434) | (Sequence Number: 1852)], and |
| | | transcription adaptations |
| 435 | GCTCAGCCAGGTAGTACTGTGTTTAAGA | pegRNA*1 (GGG-to-GGA PAM |
| | GCTATGCTGGAAACAGCATAGCAAGTT | silencing edit); contains gRNA core |
| | TAAATAAGGCTAGTCCGTTATCAGCGTG | SEQ ID NO: 1859, Linker [AAAAAT |
| | AAAACGCGGCACCGAGTCGGTGCAGCC | (Sequence Number: 1709)] + Univ. 3′ |
| | CCTTCGAGTATCCACAGTACTACCTGGC | Motif |
| | TGAAAAAATGCGGCACCGTCCGCCCAA | [GCGGCACCGTCCGCCCAAACGG |
| | ACGGTTTTTTT (SEQ ID NO: 435) | (Sequence Number: 1852)], and |
| | | transcription adaptations |
| 436 | GCTCAGCCAGGTAGTACTGTGTTTAAGA | pegRNA*1 (GGG-to-GGA PAM |
| | GCTATGCTGGAAACAGCATAGCAAGTT | silencing edit); contains gRNA core |
| | TAAATAAGGCTAGTCCGTTATCAACTTG | SEQ ID NO: 1858, Linker [ATAAAT |
| | AAAAAGTGGCACCGAGTCGGTGCAGCC | (Sequence Number: 1724)] + Univ. 3′ |
| | CCTTCGAGTATCCACAGTACTACCTGGC | Motif |
| | TGAATAAATGCGGCACCGTCCGCCCAA | [GCGGCACCGTCCGCCCAAACGG |
| | ACGGTTTTTTT (SEQ ID NO: 436) | (Sequence Number: 1852)], and |
| | | transcription adaptations |
| 437 | GCTCAGCCAGGTAGTACTGTGTTTAAGA | pegRNA*1 (GGG-to-GGA PAM |
| | GCTATGCTGGAAACAGCATAGCAAGTT | silencing edit); contains gRNA core |
| | TAAATAAGGCTAGTCCGTTATCAGCGTG | SEQ ID NO: 1859, Linker [ATAAAT |
| | AAAACGCGGCACCGAGTCGGTGCAGCC | (Sequence Number: 1724)] + Univ. 3′ |
| | CCTTCGAGTATCCACAGTACTACCTGGC | Motif |
| | TGAATAAATGCGGCACCGTCCGCCCAA | [GCGGCACCGTCCGCCCAAACGG |
| | ACGGTTTTTTT (SEQ ID NO: 437) | (Sequence Number: 1852)], and |
| | | transcription adaptations |
| 438 | GCTCAGCCAGGTAGTACTGTGTTTAAGA | pegRNA*1 (GGG-to-GGA PAM |
| | GCTATGCTGGAAACAGCATAGCAAGTT | silencing edit); contains gRNA core |
| | TAAATAAGGCTAGTCCGTTATCAACTTG | SEQ ID NO: 1858, Linker [TCATTT |
| | AAAAAGTGGCACCGAGTCGGTGCGCAG | (Sequence Number: 1737)] + Univ. 3′ |
| | CCCCTTCGAGTATCCACAGTACTACCTG | Motif |
| | GCTGATCATTTCGGGTCTCTACGTGGGG | [CGGGTCTCTACGTGGGGGCCCG |
| | GCCCGTTTTTTT (SEQ ID NO: 438) | (Sequence Number: 1851)], and |
| | | transcription adaptations |
| 439 | GCTCAGCCAGGTAGTACTGTGTTTAAGA | pegRNA*1 (GGG-to-GGA PAM |
| | GCTATGCTGGAAACAGCATAGCAAGTT | silencing edit); contains gRNA core |
| | TAAATAAGGCTAGTCCGTTATCAGCGTG | SEQ ID NO: 1859, Linker [TCATTT |
| | AAAACGCGGCACCGAGTCGGTGCGCAG | (Sequence Number: 1737)] + Univ. 3′ |
| | CCCCTTCGAGTATCCACAGTACTACCTG | Motif |
| | GCTGATCATTTCGGGTCTCTACGTGGGG | [CGGGTCTCTACGTGGGGGCCCG |
| | GCCCGTTTTTTT (SEQ ID NO: 439) | (Sequence Number: 1851)], and |
| | | transcription adaptations |
| 440 | GCTCAGCCAGGTAGTACTGTGTTTAAGA | pegRNA*1 (GGG-to-GGA PAM |
| | GCTATGCTGGAAACAGCATAGCAAGTT | silencing edit); contains gRNA core |
| | TAAATAAGGCTAGTCCGTTATCAACTTG | SEQ ID NO: 1858, Linker [TATCTT |
| | AAAAAGTGGCACCGAGTCGGTGCGCAG | (Sequence Number: 1738)] + Univ. 3′ |
| | CCCCTTCGAGTATCCACAGTACTACCTG | Motif |
| | GCTGATATCTTCGGGTCTCTACGTGGGG | [CGGGTCTCTACGTGGGGGCCCG |
| | GCCCGTTTTTTT (SEQ ID NO: 440) | (Sequence Number: 1851)], and |
| | | transcription adaptations |
| 441 | GCTCAGCCAGGTAGTACTGTGTTTAAGA | pegRNA*1 (GGG-to-GGA PAM |
| | GCTATGCTGGAAACAGCATAGCAAGTT | silencing edit); contains gRNA core |
| | TAAATAAGGCTAGTCCGTTATCAGCGTG | SEQ ID NO: 1859, Linker [TATCTT |
| | AAAACGCGGCACCGAGTCGGTGCGCAG | (Sequence Number: 1738)] + Univ. 3′ |
| | CCCCTTCGAGTATCCACAGTACTACCTG | Motif |
| | GCTGATATCTTCGGGTCTCTACGTGGGG | [CGGGTCTCTACGTGGGGGCCCG |
| | GCCCGTTTTTTT (SEQ ID NO: 441) | (Sequence Number: 1851)], and |
| | | transcription adaptations |
| 442 | GCTCAGCCAGGTAGTACTGTGTTTAAGA | pegRNA*1 (GGG-to-GGA PAM |
| | GCTATGCTGGAAACAGCATAGCAAGTT | silencing edit); contains gRNA core |
| | TAAATAAGGCTAGTCCGTTATCAACTTG | SEQ ID NO: 1858, Linker [ATAAAA |
| | AAAAAGTGGCACCGAGTCGGTGCGCAG | (Sequence Number: 1710)] + Univ. 3′ |
| | CCCCTTCGAGTATCCACAGTACTACCTG | Motif |
| | GCTGAATAAAAGCGGCACCGTCCGCCC | [GCGGCACCGTCCGCCCAAACGG |
| | AAACGGTTTTTTT (SEQ ID NO: 442) | (Sequence Number: 1852)], and |
| | | transcription adaptations |
| 443 | GCTCAGCCAGGTAGTACTGTGTTTAAGA | pegRNA*1 (GGG-to-GGA PAM |
| | GCTATGCTGGAAACAGCATAGCAAGTT | silencing edit); contains gRNA core |
| | TAAATAAGGCTAGTCCGTTATCAGCGTG | SEQ ID NO: 1859, Linker [ATAAAA |
| | AAAACGCGGCACCGAGTCGGTGCGCAG | (Sequence Number: 1710)] + Univ. 3′ |
| | CCCCTTCGAGTATCCACAGTACTACCTG | Motif |
| | GCTGAATAAAAGCGGCACCGTCCGCCC | [GCGGCACCGTCCGCCCAAACGG |
| | AAACGGTTTTTTT (SEQ ID NO: 443) | (Sequence Number: 1852)], and |
| | | transcription adaptations |
| 444 | GCTCAGCCAGGTAGTACTGTGTTTAAGA | pegRNA*1 (GGG-to-GGA PAM |
| | GCTATGCTGGAAACAGCATAGCAAGTT | silencing edit); contains gRNA core |
| | TAAATAAGGCTAGTCCGTTATCAACTTG | SEQ ID NO: 1858, Linker [AATAAA |
| | AAAAAGTGGCACCGAGTCGGTGCGCAG | (Sequence Number: 1651)] + Univ. 3′ |
| | CCCCTTCGAGTATCCACAGTACTACCTG | Motif |
| | GCTGAAATAAAGCGGCACCGTCCGCCC | [GCGGCACCGTCCGCCCAAACGG |
| | AAACGGTTTTTTT (SEQ ID NO: 444) | (Sequence Number: 1852)], and |
| | | transcription adaptations |
| 445 | GCTCAGCCAGGTAGTACTGTGTTTAAGA | pegRNA*1 (GGG-to-GGA PAM |
| | GCTATGCTGGAAACAGCATAGCAAGTT | silencing edit); contains gRNA core |
| | TAAATAAGGCTAGTCCGTTATCAGCGTG | SEQ ID NO: 1859, Linker [AATAAA |
| | AAAACGCGGCACCGAGTCGGTGCGCAG | (Sequence Number: 1651)] + Univ. 3′ |
| | CCCCTTCGAGTATCCACAGTACTACCTG | Motif |
| | GCTGAAATAAAGCGGCACCGTCCGCCC | [GCGGCACCGTCCGCCCAAACGG |
| | AAACGGTTTTTTT (SEQ ID NO: 445) | (Sequence Number: 1852)], and |
| | | transcription adaptations |
| 446 | GCTCAGCCAGGTAGTACTGTGTTTTAGA | pegRNA; contains gRNA core SEQ ID |
| | GCTAGAAATAGCAAGTTAAAATAAGGC | NO: 1854, Linker [AAGTCC |
| | TAGTCCGTTATCAACTTGAAAAAGTGGC | (Sequence Number: 1658)] + Univ. 3′ |
| | ACCGAGTCGGTGCGCAGCCCCTTCGAG | Motif |
| | TACCCACAGTACTACCTGGAAGTCCCGC | [CGCGGTTCTATCTAGTTACGCGT |
| | GGTTCTATCTAGTTACGCGTTAAACCAA | TAAACCAACTAGAA (Sequence |
| | CTAGAATTTTTTT (SEQ ID NO: 446) | Number: 1853)], and transcription |
| | | adaptations |
| 447 | GCTCAGCCAGGTAGTACTGTGTTTAAGA | pegRNA; contains gRNA core SEQ ID |
| | GCTAGAAATAGCAAGTTTAAATAAGGC | NO: 1855, Linker [AAGTCC |
| | TAGTCCGTTATCAACTTGAAAAAGTGGC | (Sequence Number: 1658)] + Univ. 3′ |
| | ACCGAGTCGGTGCGCAGCCCCTTCGAG | Motif |
| | TACCCACAGTACTACCTGGAAGTCCCGC | [CGCGGTTCTATCTAGTTACGCGT |
| | GGTTCTATCTAGTTACGCGTTAAACCAA | TAAACCAACTAGAA (Sequence |
| | CTAGAATTTTTTT (SEQ ID NO: 447) | Number: 1853)], and transcription |
| | | adaptations |
| 448 | GCTCAGCCAGGTAGTACTGTGTTTAAGA | pegRNA; contains gRNA core SEQ ID |
| | GCTAGAAATAGCAAGTTTAAATAAGGC | NO: 1856, Linker [AAGTCC |
| | TAGTCCGTTATCAGCGTGAAAACGCGG | (Sequence Number: 1658)] + Univ. 3′ |
| | CACCGAGTCGGTGCGCAGCCCCTTCGA | Motif |
| | GTACCCACAGTACTACCTGGAAGTCCC | [CGCGGTTCTATCTAGTTACGCGT |
| | GCGGTTCTATCTAGTTACGCGTTAAACC | TAAACCAACTAGAA (Sequence |
| | AACTAGAATTTTTTT (SEQ ID NO: 448) | Number: 1853)], and transcription |
| | | adaptations |
| 449 | GCTCAGCCAGGTAGTACTGTGTTTTAGA | pegRNA; contains gRNA core SEQ ID |
| | GCTAGAAATAGCAAGTTAAAATAAGGC | NO: 1854, Linker [AGTATC (Sequence |
| | TAGTCCGTTATCAACTTGAAAAAGTGGC | Number: 1739)] + Univ. 3′ Motif |
| | ACCGAGTCGGTGCGCAGCCCCTTCGAG | [CGCGGTTCTATCTAGTTACGCGT |
| | TACCCACAGTACTACCTGGAGTATCCGC | TAAACCAACTAGAA (Sequence |
| | GGTTCTATCTAGTTACGCGTTAAACCAA | Number: 1853)], and transcription |
| | CTAGAATTTTTTT (SEQ ID NO: 449) | adaptations |
| 450 | GCTCAGCCAGGTAGTACTGTGTTTAAGA | pegRNA; contains gRNA core SEQ ID |
| | GCTAGAAATAGCAAGTTTAAATAAGGC | NO: 1855, Linker [AGTATC (Sequence |
| | TAGTCCGTTATCAACTTGAAAAAGTGGC | Number: 1739)] + Univ. 3′ Motif |
| | ACCGAGTCGGTGCGCAGCCCCTTCGAG | [CGCGGTTCTATCTAGTTACGCGT |
| | TACCCACAGTACTACCTGGAGTATCCGC | TAAACCAACTAGAA (Sequence |
| | GGTTCTATCTAGTTACGCGTTAAACCAA | Number: 1853)], and transcription |
| | CTAGAATTTTTTT (SEQ ID NO: 450) | adaptations |
| 451 | GCTCAGCCAGGTAGTACTGTGTTTAAGA | pegRNA; contains gRNA core SEQ ID |
| | GCTAGAAATAGCAAGTTTAAATAAGGC | NO: 1856, Linker [AGTATC (Sequence |
| | TAGTCCGTTATCAGCGTGAAAACGCGG | Number: 1739)] + Univ. 3′ Motif |
| | CACCGAGTCGGTGCGCAGCCCCTTCGA | [CGCGGTTCTATCTAGTTACGCGT |
| | GTACCCACAGTACTACCTGGAGTATCCG | TAAACCAACTAGAA (Sequence |
| | CGGTTCTATCTAGTTACGCGTTAAACCA | Number: 1853)], and transcription |
| | ACTAGAATTTTTTT (SEQ ID NO: 451) | adaptations |
| 452 | GCTCAGCCAGGTAGTACTGTGTTTTAGA | pegRNA*1 (GGG-to-GGA PAM |
| | GCTAGAAATAGCAAGTTAAAATAAGGC | silencing edit); contains gRNA core |
| | TAGTCCGTTATCAACTTGAAAAAGTGGC | SEQ ID NO: 1854, Linker [CCTCTC |
| | ACCGAGTCGGTGCAGCCCCTTCGAGTAT | (Sequence Number: 1740)] + Univ. 3′ |
| | CCACAGTACTACCTGGCTCCTCTCCGCG | Motif |
| | GTTCTATCTAGTTACGCGTTAAACCAAC | [CGCGGTTCTATCTAGTTACGCGT |
| | TAGAATTTTTTT (SEQ ID NO: 452) | TAAACCAACTAGAA (Sequence |
| | | Number: 1853)], and transcription |
| | | adaptations |
| 453 | GCTCAGCCAGGTAGTACTGTGTTTAAGA | pegRNA*1 (GGG-to-GGA PAM |
| | GCTAGAAATAGCAAGTTTAAATAAGGC | silencing edit); contains gRNA core |
| | TAGTCCGTTATCAACTTGAAAAAGTGGC | SEQ ID NO: 1855, Linker [CCTCTC |
| | ACCGAGTCGGTGCAGCCCCTTCGAGTAT | (Sequence Number: 1740)] + Univ. 3′ |
| | CCACAGTACTACCTGGCTCCTCTCCGCG | Motif |
| | GTTCTATCTAGTTACGCGTTAAACCAAC | [CGCGGTTCTATCTAGTTACGCGT |
| | TAGAATTTTTTT (SEQ ID NO: 453) | TAAACCAACTAGAA (Sequence |
| | | Number: 1853)], and transcription |
| | | adaptations |
| 454 | GCTCAGCCAGGTAGTACTGTGTTTAAGA | pegRNA*1 (GGG-to-GGA PAM |
| | GCTAGAAATAGCAAGTTTAAATAAGGC | silencing edit); contains gRNA core |
| | TAGTCCGTTATCAGCGTGAAAACGCGG | SEQ ID NO: 1856, Linker [CCTCTC |
| | CACCGAGTCGGTGCAGCCCCTTCGAGT | (Sequence Number: 1740)] + Univ. 3′ |
| | ATCCACAGTACTACCTGGCTCCTCTCCG | Motif |
| | CGGTTCTATCTAGTTACGCGTTAAACCA | [CGCGGTTCTATCTAGTTACGCGT |
| | ACTAGAATTTTTTT (SEQ ID NO: 454) | TAAACCAACTAGAA (Sequence |
| | | Number: 1853)], and transcription |
| | | adaptations |
| 455 | GCTCAGCCAGGTAGTACTGTGTTTTAGA | pegRNA*1 (GGG-to-GGA PAM |
| | GCTAGAAATAGCAAGTTAAAATAAGGC | silencing edit); contains gRNA core |
| | TAGTCCGTTATCAACTTGAAAAAGTGGC | SEQ ID NO: 1854, Linker [CCTCAT |
| | ACCGAGTCGGTGCAGCCCCTTCGAGTAT | (Sequence Number: 1741)] + Univ. 3′ |
| | CCACAGTACTACCTGGCTCCTCATCGCG | Motif |
| | GTTCTATCTAGTTACGCGTTAAACCAAC | [CGCGGTTCTATCTAGTTACGCGT |
| | TAGAATTTTTTT (SEQ ID NO: 455) | TAAACCAACTAGAA (Sequence |
| | | Number: 1853)], and transcription |
| | | adaptations |
| 456 | GCTCAGCCAGGTAGTACTGTGTTTAAGA | pegRNA*1 (GGG-to-GGA PAM |
| | GCTAGAAATAGCAAGTTTAAATAAGGC | silencing edit); contains gRNA core |
| | TAGTCCGTTATCAACTTGAAAAAGTGGC | SEQ ID NO: 1855, Linker [CCTCAT |
| | ACCGAGTCGGTGCAGCCCCTTCGAGTAT | (Sequence Number: 1741)] + Univ. 3′ |
| | CCACAGTACTACCTGGCTCCTCATCGCG | Motif |
| | GTTCTATCTAGTTACGCGTTAAACCAAC | [CGCGGTTCTATCTAGTTACGCGT |
| | TAGAATTTTTTT (SEQ ID NO: 456) | TAAACCAACTAGAA (Sequence |
| | | Number: 1853)], and transcription |
| | | adaptations |
| 457 | GCTCAGCCAGGTAGTACTGTGTTTAAGA | pegRNA*1 (GGG-to-GGA PAM |
| | GCTAGAAATAGCAAGTTTAAATAAGGC | silencing edit); contains gRNA core |
| | TAGTCCGTTATCAGCGTGAAAACGCGG | SEQ ID NO: 1856, Linker [CCTCAT |
| | CACCGAGTCGGTGCAGCCCCTTCGAGT | (Sequence Number: 1741)] + Univ. 3′ |
| | ATCCACAGTACTACCTGGCTCCTCATCG | Motif |
| | CGGTTCTATCTAGTTACGCGTTAAACCA | [CGCGGTTCTATCTAGTTACGCGT |
| | ACTAGAATTTTTTT (SEQ ID NO: 457) | TAAACCAACTAGAA (Sequence |
| | | Number: 1853)], and transcription |
| | | adaptations |
| 458 | GCTCAGCCAGGTAGTACTGTGTTTAAGA | pegRNA; contains gRNA core SEQ ID |
| | GCGGGGAAATCCGCAAGTTTAAATAAG | NO: 1857, Linker [AAGTCC |
| | GCTAGTCCGTTATCAGCGTGAAAACGC | (Sequence Number: 1658)] + Univ. 3′ |
| | GGCACCGAGTCGGTGCGCAGCCCCTTC | Motif |
| | GAGTACCCACAGTACTACCTGGAAGTC | [CGCGGTTCTATCTAGTTACGCGT |
| | CCGCGGTTCTATCTAGTTACGCGTTAAA | TAAACCAACTAGAA (Sequence |
| | CCAACTAGAATTTTTTT (SEQ ID NO: 458) | Number: 1853)], and transcription |
| | | adaptations |
| 459 | GCTCAGCCAGGTAGTACTGTGTTTAAGA | pegRNA; contains gRNA core SEQ ID |
| | GCGGGGAAATCCGCAAGTTTAAATAAG | NO: 1857, Linker [AGTATC (Sequence |
| | GCTAGTCCGTTATCAGCGTGAAAACGC | Number: 1739)] + Univ. 3′ Motif |
| | GGCACCGAGTCGGTGCGCAGCCCCTTC | [CGCGGTTCTATCTAGTTACGCGT |
| | GAGTACCCACAGTACTACCTGGAGTAT | TAAACCAACTAGAA (Sequence |
| | CCGCGGTTCTATCTAGTTACGCGTTAAA | Number: 1853)], and transcription |
| | CCAACTAGAATTTTTTT (SEQ ID NO: 459) | adaptations |
| 460 | GCTCAGCCAGGTAGTACTGTGTTTAAGA | pegRNA*1 (GGG-to-GGA PAM |
| | GCGGGGAAATCCGCAAGTTTAAATAAG | silencing edit); contains gRNA core |
| | GCTAGTCCGTTATCAGCGTGAAAACGC | SEQ ID NO: 1857, Linker [CCTCTC |
| | GGCACCGAGTCGGTGCAGCCCCTTCGA | (Sequence Number: 1740)] + Univ. 3′ |
| | GTATCCACAGTACTACCTGGCTCCTCTC | Motif |
| | CGCGGTTCTATCTAGTTACGCGTTAAAC | [CGCGGTTCTATCTAGTTACGCGT |
| | CAACTAGAATTTTTTT (SEQ ID NO: 460) | TAAACCAACTAGAA (Sequence |
| | | Number: 1853)], and transcription |
| | | adaptations |
| 461 | GCTCAGCCAGGTAGTACTGTGTTTAAGA | pegRNA*1 (GGG-to-GGA PAM |
| | GCGGGGAAATCCGCAAGTTTAAATAAG | silencing edit); contains gRNA core |
| | GCTAGTCCGTTATCAGCGTGAAAACGC | SEQ ID NO: 1857, Linker [CCTCAT |
| | GGCACCGAGTCGGTGCAGCCCCTTCGA | (Sequence Number: 1741)] + Univ. 3′ |
| | GTATCCACAGTACTACCTGGCTCCTCAT | Motif |
| | CGCGGTTCTATCTAGTTACGCGTTAAAC | [CGCGGTTCTATCTAGTTACGCGT |
| | CAACTAGAATTTTTTT (SEQ ID NO: 461) | TAAACCAACTAGAA (Sequence |
| | | Number: 1853)], and transcription |
| | | adaptations |
| 462 | GCTCAGCCAGGTAGTACTGTGTTTTAGA | pegRNA*1 (GGG-to-GGA PAM |
| | GCTAGAAATAGCAAGTTAAAATAAGGC | silencing edit); contains gRNA core |
| | TAGTCCGTTATCAACTTGAAAAAGTGGC | SEQ ID NO: 1854, Linker [AAAATC |
| | ACCGAGTCGGTGCAGCCCCTTCGAGTAT | (Sequence Number: 1742)] + Univ. 3′ |
| | CCACAGTACTACCTGGCTGAAAAATCC | Motif |
| | GCGGTTCTATCTAGTTACGCGTTAAACC | [CGCGGTTCTATCTAGTTACGCGT |
| | AACTAGAATTTTTTT (SEQ ID NO: 462) | TAAACCAACTAGAA (Sequence |
| | | Number: 1853)], and transcription |
| | | adaptations |
| 463 | GCTCAGCCAGGTAGTACTGTGTTTAAGA | pegRNA*1 (GGG-to-GGA PAM |
| | GCTAGAAATAGCAAGTTTAAATAAGGC | silencing edit); contains gRNA core |
| | TAGTCCGTTATCAACTTGAAAAAGTGGC | SEQ ID NO: 1855, Linker [AAAATC |
| | ACCGAGTCGGTGCAGCCCCTTCGAGTAT | (Sequence Number: 1742)] + Univ. 3′ |
| | CCACAGTACTACCTGGCTGAAAAATCC | Motif |
| | GCGGTTCTATCTAGTTACGCGTTAAACC | [CGCGGTTCTATCTAGTTACGCGT |
| | AACTAGAATTTTTTT (SEQ ID NO: 463) | TAAACCAACTAGAA (Sequence |
| | | Number: 1853)], and transcription |
| | | adaptations |
| 464 | GCTCAGCCAGGTAGTACTGTGTTTAAGA | pegRNA*1 (GGG-to-GGA PAM |
| | GCTAGAAATAGCAAGTTTAAATAAGGC | silencing edit); contains gRNA core |
| | TAGTCCGTTATCAGCGTGAAAACGCGG | SEQ ID NO: 1856, Linker [AAAATC |
| | CACCGAGTCGGTGCAGCCCCTTCGAGT | (Sequence Number: 1742)] + Univ. 3′ |
| | ATCCACAGTACTACCTGGCTGAAAAAT | Motif |
| | CCGCGGTTCTATCTAGTTACGCGTTAAA | [CGCGGTTCTATCTAGTTACGCGT |
| | CCAACTAGAATTTTTTT (SEQ ID NO: 464) | TAAACCAACTAGAA (Sequence |
| | | Number: 1853)], and transcription |
| | | adaptations |
| 465 | GCTCAGCCAGGTAGTACTGTGTTTTAGA | pegRNA*1 (GGG-to-GGA PAM |
| | GCTAGAAATAGCAAGTTAAAATAAGGC | silencing edit); contains gRNA core |
| | TAGTCCGTTATCAACTTGAAAAAGTGGC | SEQ ID NO: 1854, Linker [AAACAT |
| | ACCGAGTCGGTGCAGCCCCTTCGAGTAT | (Sequence Number: 1743)] + Univ. 3′ |
| | CCACAGTACTACCTGGCTGAAAACATC | Motif |
| | GCGGTTCTATCTAGTTACGCGTTAAACC | [CGCGGTTCTATCTAGTTACGCGT |
| | AACTAGAATTTTTTT (SEQ ID NO: 465) | TAAACCAACTAGAA (Sequence |
| | | Number: 1853)], and transcription |
| | | adaptations |
| 466 | GCTCAGCCAGGTAGTACTGTGTTTAAGA | pegRNA*1 (GGG-to-GGA PAM |
| | GCTAGAAATAGCAAGTTTAAATAAGGC | silencing edit); contains gRNA core |
| | TAGTCCGTTATCAACTTGAAAAAGTGGC | SEQ ID NO: 1855, Linker [AAACAT |
| | ACCGAGTCGGTGCAGCCCCTTCGAGTAT | (Sequence Number: 1743)] + Univ. 3′ |
| | CCACAGTACTACCTGGCTGAAAACATC | Motif |
| | GCGGTTCTATCTAGTTACGCGTTAAACC | [CGCGGTTCTATCTAGTTACGCGT |
| | AACTAGAATTTTTTT (SEQ ID NO: 466) | TAAACCAACTAGAA (Sequence |
| | | Number: 1853)], and transcription |
| | | adaptations |
| 467 | GCTCAGCCAGGTAGTACTGTGTTTAAGA | pegRNA*1 (GGG-to-GGA PAM |
| | GCTAGAAATAGCAAGTTTAAATAAGGC | silencing edit); contains gRNA core |
| | TAGTCCGTTATCAGCGTGAAAACGCGG | SEQ ID NO: 1856, Linker [AAACAT |
| | CACCGAGTCGGTGCAGCCCCTTCGAGT | (Sequence Number: 1743)] + Univ. 3′ |
| | ATCCACAGTACTACCTGGCTGAAAACA | Motif |
| | TCGCGGTTCTATCTAGTTACGCGTTAAA | [CGCGGTTCTATCTAGTTACGCGT |
| | CCAACTAGAATTTTTTT (SEQ ID NO: 467) | TAAACCAACTAGAA (Sequence |
| | | Number: 1853)], and transcription |
| | | adaptations |
| 468 | GCTCAGCCAGGTAGTACTGTGTTTAAGA | pegRNA*1 (GGG-to-GGA PAM |
| | GCGGGGAAATCCGCAAGTTTAAATAAG | silencing edit); contains gRNA core |
| | GCTAGTCCGTTATCAGCGTGAAAACGC | SEQ ID NO: 1857, Linker [AAAATC |
| | GGCACCGAGTCGGTGCAGCCCCTTCGA | (Sequence Number: 1742)] + Univ. 3′ |
| | GTATCCACAGTACTACCTGGCTGAAAA | Motif |
| | ATCCGCGGTTCTATCTAGTTACGCGTTA | [CGCGGTTCTATCTAGTTACGCGT |
| | AACCAACTAGAATTTTTTT (SEQ ID NO: | TAAACCAACTAGAA (Sequence |
| | 468) | Number: 1853)], and transcription |
| | | adaptations |
| 469 | GCTCAGCCAGGTAGTACTGTGTTTAAGA | pegRNA*1 (GGG-to-GGA PAM |
| | GCGGGGAAATCCGCAAGTTTAAATAAG | silencing edit); contains gRNA core |
| | GCTAGTCCGTTATCAGCGTGAAAACGC | SEQ ID NO: 1857, Linker [AAACAT |
| | GGCACCGAGTCGGTGCAGCCCCTTCGA | (Sequence Number: 1743)] + Univ. 3′ |
| | GTATCCACAGTACTACCTGGCTGAAAA | Motif |
| | CATCGCGGTTCTATCTAGTTACGCGTTA | [CGCGGTTCTATCTAGTTACGCGT |
| | AACCAACTAGAATTTTTTT (SEQ ID NO: | TAAACCAACTAGAA (Sequence |
| | 469) | Number: 1853)], and transcription |
| | | adaptations |
| 470 | GCTCAGCCAGGTAGTACTGTGTTTTAGA | pegRNA*1 (GGG-to-GGA PAM |
| | GCTAGAAATAGCAAGTTAAAATAAGGC | silencing edit); contains gRNA core |
| | TAGTCCGTTATCAACTTGAAAAAGTGGC | SEQ ID NO: 1854, Linker [TTCATC |
| | ACCGAGTCGGTGCGCAGCCCCTTCGAG | (Sequence Number: 1744)] + Univ. 3′ |
| | TATCCACAGTACTACCTGGCTGATTCAT | Motif |
| | CCGCGGTTCTATCTAGTTACGCGTTAAA | [CGCGGTTCTATCTAGTTACGCGT |
| | CCAACTAGAATTTTTTT (SEQ ID NO: 470) | TAAACCAACTAGAA (Sequence |
| | | Number: 1853)], and transcription |
| | | adaptations |
| 471 | GCTCAGCCAGGTAGTACTGTGTTTAAGA | pegRNA*1 (GGG-to-GGA PAM |
| | GCTAGAAATAGCAAGTTTAAATAAGGC | silencing edit); contains gRNA core |
| | TAGTCCGTTATCAACTTGAAAAAGTGGC | SEQ ID NO: 1855, Linker [TTCATC |
| | ACCGAGTCGGTGCGCAGCCCCTTCGAG | (Sequence Number: 1744)] + Univ. 3′ |
| | TATCCACAGTACTACCTGGCTGATTCAT | Motif |
| | CCGCGGTTCTATCTAGTTACGCGTTAAA | [CGCGGTTCTATCTAGTTACGCGT |
| | CCAACTAGAATTTTTTT (SEQ ID NO: 471) | TAAACCAACTAGAA (Sequence |
| | | Number: 1853)], and transcription |
| | | adaptations |
| 472 | GCTCAGCCAGGTAGTACTGTGTTTAAGA | pegRNA*1 (GGG-to-GGA PAM |
| | GCTAGAAATAGCAAGTTTAAATAAGGC | silencing edit); contains gRNA core |
| | TAGTCCGTTATCAGCGTGAAAACGCGG | SEQ ID NO: 1856, Linker [TTCATC |
| | CACCGAGTCGGTGCGCAGCCCCTTCGA | (Sequence Number: 1744)] + Univ. 3′ |
| | GTATCCACAGTACTACCTGGCTGATTCA | Motif |
| | TCCGCGGTTCTATCTAGTTACGCGTTAA | [CGCGGTTCTATCTAGTTACGCGT |
| | ACCAACTAGAATTTTTTT (SEQ ID NO: | TAAACCAACTAGAA (Sequence |
| | 472) | Number: 1853)], and transcription |
| | | adaptations |
| 473 | GCTCAGCCAGGTAGTACTGTGTTTTAGA | pegRNA*1 (GGG-to-GGA PAM |
| | GCTAGAAATAGCAAGTTAAAATAAGGC | silencing edit); contains gRNA core |
| | TAGTCCGTTATCAACTTGAAAAAGTGGC | SEQ ID NO: 1854, Linker [ATATCC |
| | ACCGAGTCGGTGCGCAGCCCCTTCGAG | (Sequence Number: 1745)] + Univ. 3′ |
| | TATCCACAGTACTACCTGGCTGAATATC | Motif |
| | CCGCGGTTCTATCTAGTTACGCGTTAAA | [CGCGGTTCTATCTAGTTACGCGT |
| | CCAACTAGAATTTTTTT (SEQ ID NO: 473) | TAAACCAACTAGAA (Sequence |
| | | Number: 1853)], and transcription |
| | | adaptations |
| 474 | GCTCAGCCAGGTAGTACTGTGTTTAAGA | pegRNA*1 (GGG-to-GGA PAM |
| | GCTAGAAATAGCAAGTTTAAATAAGGC | silencing edit); contains gRNA core |
| | TAGTCCGTTATCAACTTGAAAAAGTGGC | SEQ ID NO: 1855, Linker [ATATCC |
| | ACCGAGTCGGTGCGCAGCCCCTTCGAG | (Sequence Number: 1745)] + Univ. 3′ |
| | TATCCACAGTACTACCTGGCTGAATATC | Motif |
| | CCGCGGTTCTATCTAGTTACGCGTTAAA | [CGCGGTTCTATCTAGTTACGCGT |
| | CCAACTAGAATTTTTTT (SEQ ID NO: 474) | TAAACCAACTAGAA (Sequence |
| | | Number: 1853)], and transcription |
| | | adaptations |
| 475 | GCTCAGCCAGGTAGTACTGTGTTTAAGA | pegRNA*1 (GGG-to-GGA PAM |
| | GCTAGAAATAGCAAGTTTAAATAAGGC | silencing edit); contains gRNA core |
| | TAGTCCGTTATCAGCGTGAAAACGCGG | SEQ ID NO: 1856, Linker [ATATCC |
| | CACCGAGTCGGTGCGCAGCCCCTTCGA | (Sequence Number: 1745)] + Univ. 3′ |
| | GTATCCACAGTACTACCTGGCTGAATAT | Motif |
| | CCCGCGGTTCTATCTAGTTACGCGTTAA | [CGCGGTTCTATCTAGTTACGCGT |
| | ACCAACTAGAATTTTTTT (SEQ ID NO: | TAAACCAACTAGAA (Sequence |
| | 475) | Number: 1853)], and transcription |
| | | adaptations |
| 476 | GCTCAGCCAGGTAGTACTGTGTTTAAGA | pegRNA*1 (GGG-to-GGA PAM |
| | GCGGGGAAATCCGCAAGTTTAAATAAG | silencing edit); contains gRNA core |
| | GCTAGTCCGTTATCAGCGTGAAAACGC | SEQ ID NO: 1857, Linker [TTCATC |
| | GGCACCGAGTCGGTGCGCAGCCCCTTC | (Sequence Number: 1744)] + Univ. 3′ |
| | GAGTATCCACAGTACTACCTGGCTGATT | Motif |
| | CATCCGCGGTTCTATCTAGTTACGCGTT | [CGCGGTTCTATCTAGTTACGCGT |
| | AAACCAACTAGAATTTTTTT (SEQ ID | TAAACCAACTAGAA (Sequence |
| | NO: 476) | Number: 1853)], and transcription |
| | | adaptations |
| 477 | GCTCAGCCAGGTAGTACTGTGTTTAAGA | pegRNA*1 (GGG-to-GGA PAM |
| | GCGGGGAAATCCGCAAGTTTAAATAAG | silencing edit); contains gRNA core |
| | GCTAGTCCGTTATCAGCGTGAAAACGC | SEQ ID NO: 1857, Linker [ATATCC |
| | GGCACCGAGTCGGTGCGCAGCCCCTTC | (Sequence Number: 1745)] + Univ. 3′ |
| | GAGTATCCACAGTACTACCTGGCTGAAT | Motif |
| | ATCCCGCGGTTCTATCTAGTTACGCGTT | [CGCGGTTCTATCTAGTTACGCGT |
| | AAACCAACTAGAATTTTTTT (SEQ ID | TAAACCAACTAGAA (Sequence |
| | NO: 477) | Number: 1853)], and transcription |
| | | adaptations |
| 478 | GCTCAGCCAGGTAGTACTGTGTTTAAGA | pegRNA; contains gRNA core SEQ ID |
| | GCTATGCTGGAAACAGCATAGCAAGTT | NO: 1858, Linker [AAGTCC |
| | TAAATAAGGCTAGTCCGTTATCAACTTG | (Sequence Number: 1658)] + Univ. 3′ |
| | AAAAAGTGGCACCGAGTCGGTGCGCAG | Motif |
| | CCCCTTCGAGTACCCACAGTACTACCTG | [CGCGGTTCTATCTAGTTACGCGT |
| | GAAGTCCCGCGGTTCTATCTAGTTACGC | TAAACCAACTAGAA (Sequence |
| | GTTAAACCAACTAGAATTTTTTT (SEQ | Number: 1853)], and transcription |
| | ID NO: 478) | adaptations |
| 479 | GCTCAGCCAGGTAGTACTGTGTTTAAGA | pegRNA; contains gRNA core SEQ ID |
| | GCTATGCTGGAAACAGCATAGCAAGTT | NO: 1859, Linker [AAGTCC |
| | TAAATAAGGCTAGTCCGTTATCAGCGTG | (Sequence Number: 1658)] + Univ. 3′ |
| | AAAACGCGGCACCGAGTCGGTGCGCAG | Motif |
| | CCCCTTCGAGTACCCACAGTACTACCTG | [CGCGGTTCTATCTAGTTACGCGT |
| | GAAGTCCCGCGGTTCTATCTAGTTACGC | TAAACCAACTAGAA (Sequence |
| | GTTAAACCAACTAGAATTTTTTT (SEQ | Number: 1853)], and transcription |
| | ID NO: 479) | adaptations |
| 480 | GCTCAGCCAGGTAGTACTGTGTTTAAGA | pegRNA; contains gRNA core SEQ ID |
| | GCTATGCTGGAAACAGCATAGCAAGTT | NO: 1858, Linker [AGTATC (Sequence |
| | TAAATAAGGCTAGTCCGTTATCAACTTG | Number: 1739)] + Univ. 3′ Motif |
| | AAAAAGTGGCACCGAGTCGGTGCGCAG | [CGCGGTTCTATCTAGTTACGCGT |
| | CCCCTTCGAGTACCCACAGTACTACCTG | TAAACCAACTAGAA (Sequence |
| | GAGTATCCGCGGTTCTATCTAGTTACGC | Number: 1853)], and transcription |
| | GTTAAACCAACTAGAATTTTTTT (SEQ | adaptations |
| | ID NO: 480) | |
| 481 | GCTCAGCCAGGTAGTACTGTGTTTAAGA | pegRNA; contains gRNA core SEQ ID |
| | GCTATGCTGGAAACAGCATAGCAAGTT | NO: 1859, Linker [AGTATC (Sequence |
| | TAAATAAGGCTAGTCCGTTATCAGCGTG | Number: 1739)] + Univ. 3′ Motif |
| | AAAACGCGGCACCGAGTCGGTGCGCAG | [CGCGGTTCTATCTAGTTACGCGT |
| | CCCCTTCGAGTACCCACAGTACTACCTG | TAAACCAACTAGAA (Sequence |
| | GAGTATCCGCGGTTCTATCTAGTTACGC | Number: 1853)], and transcription |
| | GTTAAACCAACTAGAATTTTTTT (SEQ | adaptations |
| | ID NO: 481) | |
| 482 | GCTCAGCCAGGTAGTACTGTGTTTAAGA | pegRNA*1 (GGG-to-GGA PAM |
| | GCTATGCTGGAAACAGCATAGCAAGTT | silencing edit); contains gRNA core |
| | TAAATAAGGCTAGTCCGTTATCAACTTG | SEQ ID NO: 1858, Linker [CCTCTC |
| | AAAAAGTGGCACCGAGTCGGTGCAGCC | (Sequence Number: 1740)] + Univ. 3′ |
| | CCTTCGAGTATCCACAGTACTACCTGGC | Motif |
| | TCCTCTCCGCGGTTCTATCTAGTTACGC | [CGCGGTTCTATCTAGTTACGCGT |
| | GTTAAACCAACTAGAATTTTTTT (SEQ | TAAACCAACTAGAA (Sequence |
| | ID NO: 482) | Number: 1853)], and transcription |
| | | adaptations |
| 483 | GCTCAGCCAGGTAGTACTGTGTTTAAGA | pegRNA*1 (GGG-to-GGA PAM |
| | GCTATGCTGGAAACAGCATAGCAAGTT | silencing edit); contains gRNA core |
| | TAAATAAGGCTAGTCCGTTATCAGCGTG | SEQ ID NO: 1859, Linker [CCTCTC |
| | AAAACGCGGCACCGAGTCGGTGCAGCC | (Sequence Number: 1740)] + Univ. 3′ |
| | CCTTCGAGTATCCACAGTACTACCTGGC | Motif |
| | TCCTCTCCGCGGTTCTATCTAGTTACGC | [CGCGGTTCTATCTAGTTACGCGT |
| | GTTAAACCAACTAGAATTTTTTT (SEQ | TAAACCAACTAGAA (Sequence |
| | ID NO: 483) | Number: 1853)], and transcription |
| | | adaptations |
| 484 | GCTCAGCCAGGTAGTACTGTGTTTAAGA | pegRNA*1 (GGG-to-GGA PAM |
| | GCTATGCTGGAAACAGCATAGCAAGTT | silencing edit); contains gRNA core |
| | TAAATAAGGCTAGTCCGTTATCAACTTG | SEQ ID NO: 1858, Linker [CCTCAT |
| | AAAAAGTGGCACCGAGTCGGTGCAGCC | (Sequence Number: 1741)] + Univ. 3′ |
| | CCTTCGAGTATCCACAGTACTACCTGGC | Motif |
| | TCCTCATCGCGGTTCTATCTAGTTACGC | [CGCGGTTCTATCTAGTTACGCGT |
| | GTTAAACCAACTAGAATTTTTTT (SEQ | TAAACCAACTAGAA (Sequence |
| | ID NO: 484) | Number: 1853)], and transcription |
| | | adaptations |
| 485 | GCTCAGCCAGGTAGTACTGTGTTTAAGA | pegRNA*1 (GGG-to-GGA PAM |
| | GCTATGCTGGAAACAGCATAGCAAGTT | silencing edit); contains gRNA core |
| | TAAATAAGGCTAGTCCGTTATCAGCGTG | SEQ ID NO: 1859, Linker [CCTCAT |
| | AAAACGCGGCACCGAGTCGGTGCAGCC | (Sequence Number: 1741)] + Univ. 3′ |
| | CCTTCGAGTATCCACAGTACTACCTGGC | Motif |
| | TCCTCATCGCGGTTCTATCTAGTTACGC | [CGCGGTTCTATCTAGTTACGCGT |
| | GTTAAACCAACTAGAATTTTTTT (SEQ | TAAACCAACTAGAA (Sequence |
| | ID NO: 485) | Number: 1853)], and transcription |
| | | adaptations |
| 486 | GCTCAGCCAGGTAGTACTGTGTTTAAGA | pegRNA*1 (GGG-to-GGA PAM |
| | GCTATGCTGGAAACAGCATAGCAAGTT | silencing edit); contains gRNA core |
| | TAAATAAGGCTAGTCCGTTATCAACTTG | SEQ ID NO: 1858, Linker [AAAATC |
| | AAAAAGTGGCACCGAGTCGGTGCAGCC | (Sequence Number: 1742)] + Univ. 3′ |
| | CCTTCGAGTATCCACAGTACTACCTGGC | Motif |
| | TGAAAAATCCGCGGTTCTATCTAGTTAC | [CGCGGTTCTATCTAGTTACGCGT |
| | GCGTTAAACCAACTAGAATTTTTTT | TAAACCAACTAGAA (Sequence |
| | (SEQ ID NO: 486) | Number: 1853)], and transcription |
| | | adaptations |
| 487 | GCTCAGCCAGGTAGTACTGTGTTTAAGA | pegRNA*1 (GGG-to-GGA PAM |
| | GCTATGCTGGAAACAGCATAGCAAGTT | silencing edit); contains gRNA core |
| | TAAATAAGGCTAGTCCGTTATCAGCGTG | SEQ ID NO: 1859, Linker [AAAATC |
| | AAAACGCGGCACCGAGTCGGTGCAGCC | (Sequence Number: 1742)] + Univ. 3′ |
| | CCTTCGAGTATCCACAGTACTACCTGGC | Motif |
| | TGAAAAATCCGCGGTTCTATCTAGTTAC | [CGCGGTTCTATCTAGTTACGCGT |
| | GCGTTAAACCAACTAGAATTTTTTT | TAAACCAACTAGAA (Sequence |
| | (SEQ ID NO: 487) | Number: 1853)], and transcription |
| | | adaptations |
| 488 | GCTCAGCCAGGTAGTACTGTGTTTAAGA | pegRNA*1 (GGG-to-GGA PAM |
| | GCTATGCTGGAAACAGCATAGCAAGTT | silencing edit); contains gRNA core |
| | TAAATAAGGCTAGTCCGTTATCAACTTG | SEQ ID NO: 1858, Linker [AAACAT |
| | AAAAAGTGGCACCGAGTCGGTGCAGCC | (Sequence Number: 1743)] + Univ. 3′ |
| | CCTTCGAGTATCCACAGTACTACCTGGC | Motif |
| | TGAAAACATCGCGGTTCTATCTAGTTAC | [CGCGGTTCTATCTAGTTACGCGT |
| | GCGTTAAACCAACTAGAATTTTTTT | TAAACCAACTAGAA (Sequence |
| | (SEQ ID NO: 488) | Number: 1853)], and transcription |
| | | adaptations |
| 489 | GCTCAGCCAGGTAGTACTGTGTTTAAGA | pegRNA*1 (GGG-to-GGA PAM |
| | GCTATGCTGGAAACAGCATAGCAAGTT | silencing edit); contains gRNA core |
| | TAAATAAGGCTAGTCCGTTATCAGCGTG | SEQ ID NO: 1859, Linker [AAACAT |
| | AAAACGCGGCACCGAGTCGGTGCAGCC | (Sequence Number: 1743)] + Univ. 3′ |
| | CCTTCGAGTATCCACAGTACTACCTGGC | Motif |
| | TGAAAACATCGCGGTTCTATCTAGTTAC | [CGCGGTTCTATCTAGTTACGCGT |
| | GCGTTAAACCAACTAGAATTTTTTT | TAAACCAACTAGAA (Sequence |
| | (SEQ ID NO: 489) | Number: 1853)], and transcription |
| | | adaptations |
| 490 | GCTCAGCCAGGTAGTACTGTGTTTAAGA | pegRNA*1 (GGG-to-GGA PAM |
| | GCTATGCTGGAAACAGCATAGCAAGTT | silencing edit); contains gRNA core |
| | TAAATAAGGCTAGTCCGTTATCAACTTG | SEQ ID NO: 1858, Linker [TTCATC |
| | AAAAAGTGGCACCGAGTCGGTGCGCAG | (Sequence Number: 1744)] + Univ. 3′ |
| | CCCCTTCGAGTATCCACAGTACTACCTG | Motif |
| | GCTGATTCATCCGCGGTTCTATCTAGTT | [CGCGGTTCTATCTAGTTACGCGT |
| | ACGCGTTAAACCAACTAGAATTTTTTT | TAAACCAACTAGAA (Sequence |
| | (SEQ ID NO: 490) | Number: 1853)], and transcription |
| | | adaptations |
| 491 | GCTCAGCCAGGTAGTACTGTGTTTAAGA | pegRNA*1 (GGG-to-GGA PAM |
| | GCTATGCTGGAAACAGCATAGCAAGTT | silencing edit); contains gRNA core |
| | TAAATAAGGCTAGTCCGTTATCAGCGTG | SEQ ID NO: 1859, Linker [TTCATC |
| | AAAACGCGGCACCGAGTCGGTGCGCAG | (Sequence Number: 1744)] + Univ. 3′ |
| | CCCCTTCGAGTATCCACAGTACTACCTG | Motif |
| | GCTGATTCATCCGCGGTTCTATCTAGTT | [CGCGGTTCTATCTAGTTACGCGT |
| | ACGCGTTAAACCAACTAGAATTTTTTT | TAAACCAACTAGAA (Sequence |
| | (SEQ ID NO: 491) | Number: 1853)], and transcription |
| | | adaptations |
| 492 | GCTCAGCCAGGTAGTACTGTGTTTAAGA | pegRNA*1 (GGG-to-GGA PAM |
| | GCTATGCTGGAAACAGCATAGCAAGTT | silencing edit); contains gRNA core |
| | TAAATAAGGCTAGTCCGTTATCAACTTG | SEQ ID NO: 1858, Linker [ATATCC |
| | AAAAAGTGGCACCGAGTCGGTGCGCAG | (Sequence Number: 1745)] + Univ. 3′ |
| | CCCCTTCGAGTATCCACAGTACTACCTG | Motif |
| | GCTGAATATCCCGCGGTTCTATCTAGTT | [CGCGGTTCTATCTAGTTACGCGT |
| | ACGCGTTAAACCAACTAGAATTTTTTT | TAAACCAACTAGAA (Sequence |
| | (SEQ ID NO: 492) | Number: 1853)], and transcription |
| | | adaptations |
| 493 | GCTCAGCCAGGTAGTACTGTGTTTAAGA | pegRNA*1 (GGG-to-GGA PAM |
| | GCTATGCTGGAAACAGCATAGCAAGTT | silencing edit); contains gRNA core |
| | TAAATAAGGCTAGTCCGTTATCAGCGTG | SEQ ID NO: 1859, Linker [ATATCC |
| | AAAACGCGGCACCGAGTCGGTGCGCAG | (Sequence Number: 1745)] + Univ. 3′ |
| | CCCCTTCGAGTATCCACAGTACTACCTG | Motif |
| | GCTGAATATCCCGCGGTTCTATCTAGTT | [CGCGGTTCTATCTAGTTACGCGT |
| | ACGCGTTAAACCAACTAGAATTTTTTT | TAAACCAACTAGAA (Sequence |
| | (SEQ ID NO: 493) | Number: 1853)], and transcription |
| | | adaptations |
| 494 | CGAGTACCCACAGTACTACCGTTTTAGA | PE3 ngRNA (TGG PAM); contains |
| | GCTAGAAATAGCAAGTTAAAATAAGGC | gRNA core SEQ ID NO: 1854 |
| | TAGTCCGTTATCAACTTGAAAAAGTGGC | |
| | ACCGAGTCGGTGC (SEQ ID NO: 494) | |
| 495 | CGAGTATCCACAGTACTACCGTTTTAGA | PE3b*1 ngRNA (TGG PAM); contains |
| | GCTAGAAATAGCAAGTTAAAATAAGGC | gRNA core SEQ ID NO: 1854 |
| | TAGTCCGTTATCAACTTGAAAAAGTGGC | |
| | ACCGAGTCGGTGC (SEQ ID NO: 495) | |
| 496 | CTTCTCCAATGCGACGGGTGGTTTTAGA | PE3 ngRNA (TGG PAM); contains |
| | GCTAGAAATAGCAAGTTAAAATAAGGC | gRNA core SEQ ID NO: 1854 |
| | TAGTCCGTTATCAACTTGAAAAAGTGGC | |
| | ACCGAGTCGGTGC (SEQ ID NO: 496) | |
| 497 | GTGCCCTTCTCCAATGCGACGTTTTAGA | PE3 ngRNA (GGG PAM); contains |
| | GCTAGAAATAGCAAGTTAAAATAAGGC | gRNA core SEQ ID NO: 1854 |
| | TAGTCCGTTATCAACTTGAAAAAGTGGC | |
| | ACCGAGTCGGTGC (SEQ ID NO: 497) | |
| 498 | CGTGCCCTTCTCCAATGCGAGTTTTAGA | PE3 ngRNA (CGG PAM); contains |
| | GCTAGAAATAGCAAGTTAAAATAAGGC | gRNA core SEQ ID NO: 1854 |
| | TAGTCCGTTATCAACTTGAAAAAGTGGC | |
| | ACCGAGTCGGTGC (SEQ ID NO: 498) | |
| 499 | ACAGCCATGAATGGCACAGAGTTTTAG | PE3 ngRNA (AGG PAM); contains |
| | AGCTAGAAATAGCAAGTTAAAATAAGG | gRNA core SEQ ID NO: 1854 |
| | CTAGTCCGTTATCAACTTGAAAAAGTGG | |
| | CACCGAGTCGGTGC (SEQ ID NO: 499) | |
| 500 | ACAAGGGCCACAGCCATGAAGTTTTAG | PE3 ngRNA (TGG PAM); contains |
| | AGCTAGAAATAGCAAGTTAAAATAAGG | gRNA core SEQ ID NO: 1854 |
| | CTAGTCCGTTATCAACTTGAAAAAGTGG | |
| | CACCGAGTCGGTGC (SEQ ID NO: 500) | |
| 501 | CAGCCACGGGTCAGCCACAAGTTTTAG | PE3 ngRNA (GGG PAM); contains |
| | AGCTAGAAATAGCAAGTTAAAATAAGG | gRNA core SEQ ID NO: 1854 |
| | CTAGTCCGTTATCAACTTGAAAAAGTGG | |
| | CACCGAGTCGGTGC (SEQ ID NO: 501) | |
| 502 | GCGTGCCCTTCTCCAATGCGAGTTTTAG | PE3 ngRNA (CGG PAM); contains |
| | AGCTAGAAATAGCAAGTTAAAATAAGG | gRNA core SEQ ID NO: 1854 |
| | CTAGTCCGTTATCAACTTGAAAAAGTGG | |
| | CACCGAGTCGGTGC (SEQ ID NO: 502) | |
| 503 | GACAGCCATGAATGGCACAGAGTTTTA | PE3 ngRNA (AGG PAM); contains |
| | GAGCTAGAAATAGCAAGTTAAAATAAG | gRNA core SEQ ID NO: 1854 |
| | GCTAGTCCGTTATCAACTTGAAAAAGTG | |
| | GCACCGAGTCGGTGC (SEQ ID NO: 503) | |
| 504 | GCGAGTACCCACAGTACTACCGTTTTAG | PE3 ngRNA (TGG PAM); contains |
| | AGCTAGAAATAGCAAGTTAAAATAAGG | gRNA core SEQ ID NO: 1854 |
| | CTAGTCCGTTATCAACTTGAAAAAGTGG | |
| | CACCGAGTCGGTGC (SEQ ID NO: 504) | |
| 505 | CGAGTACCCACAGTACTACCGTTTTAGA | PE3 ngRNA (TGG PAM); contains |
| | GCTAGAAATAGCAAGTTAAAATAAGGC | gRNA core SEQ ID NO: 1854, and |
| | TAGTCCGTTATCAACTTGAAAAAGTGGC | Linker [AACATTGA (Sequence |
| | ACCGAGTCGGTGCAACATTGACGCGTC | Number: 1728)] + Univ. 3′ Motif |
| | TCTACGTGGGGGCGCG (SEQ ID NO: 505) | [CGCGTCTCTACGTGGGGGCGCG |
| | | (Sequence Number: 1850)] |
| 506 | CGAGTATCCACAGTACTACCGTTTTAGA | PE3b*1 ngRNA (TGG PAM); contains |
| | GCTAGAAATAGCAAGTTAAAATAAGGC | gRNA core SEQ ID NO: 1854, and |
| | TAGTCCGTTATCAACTTGAAAAAGTGGC | Linker [AACATTGA (Sequence |
| | ACCGAGTCGGTGCAACATTGACGCGTC | Number: 1728)] + Univ. 3′ Motif |
| | TCTACGTGGGGGCGCG (SEQ ID NO: 506) | [CGCGTCTCTACGTGGGGGCGCG |
| | | (Sequence Number: 1850)] |
| 507 | CTTCTCCAATGCGACGGGTGGTTTTAGA | PE3 ngRNA (TGG PAM); contains |
| | GCTAGAAATAGCAAGTTAAAATAAGGC | gRNA core SEQ ID NO: 1854, and |
| | TAGTCCGTTATCAACTTGAAAAAGTGGC | Linker [AACATTGA (Sequence |
| | ACCGAGTCGGTGCAACATTGACGCGTC | Number: 1728)] + Univ. 3′ Motif |
| | TCTACGTGGGGGCGCG (SEQ ID NO: 507) | [CGCGTCTCTACGTGGGGGCGCG |
| | | (Sequence Number: 1850)] |
| 508 | GTGCCCTTCTCCAATGCGACGTTTTAGA | PE3 ngRNA (GGG PAM); contains |
| | GCTAGAAATAGCAAGTTAAAATAAGGC | gRNA core SEQ ID NO: 1854, and |
| | TAGTCCGTTATCAACTTGAAAAAGTGGC | Linker [AACATTGA (Sequence |
| | ACCGAGTCGGTGCAACATTGACGCGTC | Number: 1728)] + Univ. 3′ Motif |
| | TCTACGTGGGGGCGCG (SEQ ID NO: 508) | [CGCGTCTCTACGTGGGGGCGCG |
| | | (Sequence Number: 1850)] |
| 509 | CGTGCCCTTCTCCAATGCGAGTTTTAGA | PE3 ngRNA (CGG PAM); contains |
| | GCTAGAAATAGCAAGTTAAAATAAGGC | gRNA core SEQ ID NO: 1854, and |
| | TAGTCCGTTATCAACTTGAAAAAGTGGC | Linker [AACATTGA (Sequence |
| | ACCGAGTCGGTGCAACATTGACGCGTC | Number: 1728)] + Univ. 3′ Motif |
| | TCTACGTGGGGGCGCG (SEQ ID NO: 509) | [CGCGTCTCTACGTGGGGGCGCG |
| | | (Sequence Number: 1850)] |
| 510 | ACAGCCATGAATGGCACAGAGTTTTAG | PE3 ngRNA (AGG PAM); contains |
| | AGCTAGAAATAGCAAGTTAAAATAAGG | gRNA core SEQ ID NO: 1854, and |
| | CTAGTCCGTTATCAACTTGAAAAAGTGG | Linker [AACATTGA (Sequence |
| | CACCGAGTCGGTGCAACATTGACGCGT | Number: 1728)] + Univ. 3′ Motif |
| | CTCTACGTGGGGGCGCG (SEQ ID NO: | [CGCGTCTCTACGTGGGGGCGCG |
| | 510) | (Sequence Number: 1850)] |
| 511 | ACAAGGGCCACAGCCATGAAGTTTTAG | PE3 ngRNA (TGG PAM); contains |
| | AGCTAGAAATAGCAAGTTAAAATAAGG | gRNA core SEQ ID NO: 1854, and |
| | CTAGTCCGTTATCAACTTGAAAAAGTGG | Linker [AACATTGA (Sequence |
| | CACCGAGTCGGTGCAACATTGACGCGT | Number: 1728)] + Univ. 3′ Motif |
| | CTCTACGTGGGGGCGCG (SEQ ID NO: | [CGCGTCTCTACGTGGGGGCGCG |
| | 511) | (Sequence Number: 1850)] |
| 512 | CAGCCACGGGTCAGCCACAAGTTTTAG | PE3 ngRNA (GGG PAM); contains |
| | AGCTAGAAATAGCAAGTTAAAATAAGG | gRNA core SEQ ID NO: 1854, and |
| | CTAGTCCGTTATCAACTTGAAAAAGTGG | Linker [AACATTGA (Sequence |
| | CACCGAGTCGGTGCAACATTGACGCGT | Number: 1728)] + Univ. 3′ Motif |
| | CTCTACGTGGGGGCGCG (SEQ ID NO: | [CGCGTCTCTACGTGGGGGCGCG |
| | 512) | (Sequence Number: 1850)] |
| 513 | GTGCCCTTCTCCAATGCGACGTTTTAGA | PE3 ngRNA (GGG PAM); contains |
| | GCTAGAAATAGCAAGTTAAAATAAGGC | gRNA core SEQ ID NO: 1854, Linker |
| | TAGTCCGTTATCAACTTGAAAAAGTGGC | [AACATTGA (Sequence Number: |
| | ACCGAGTCGGTGCAACATTGACGCGTC | 1728)] + Univ. 3′ Motif |
| | TCTACGTGGGGGCGCGTTTTTTT (SEQ ID | [CGCGTCTCTACGTGGGGGCGCG |
| | NO: 513) | (Sequence Number: 1850)], and |
| | | transcription adaptations |
| 514 | GCGTGCCCTTCTCCAATGCGAGTTTTAG | PE3 ngRNA (CGG PAM); contains |
| | AGCTAGAAATAGCAAGTTAAAATAAGG | gRNA core SEQ ID NO: 1854, Linker |
| | CTAGTCCGTTATCAACTTGAAAAAGTGG | [AACATTGA (Sequence Number: |
| | CACCGAGTCGGTGCAACATTGACGCGT | 1728)] + Univ. 3′ Motif |
| | CTCTACGTGGGGGCGCGTTTTTTT (SEQ | CGCGTCTCTACGTGGGGGCGCG |
| | ID NO: 514) | (Sequence Number: 1850)], and |
| | | transcription adaptations |
| 515 | GACAGCCATGAATGGCACAGAGTTTTA | PE3 ngRNA (AGG PAM); contains |
| | GAGCTAGAAATAGCAAGTTAAAATAAG | gRNA core SEQ ID NO: 1854, Linker |
| | GCTAGTCCGTTATCAACTTGAAAAAGTG | [AACATTGA (Sequence Number: |
| | GCACCGAGTCGGTGCAACATTGACGCG | 1728)] + Univ. 3′ Motif |
| | TCTCTACGTGGGGGCGCGTTTTTTT (SEQ | [CGCGTCTCTACGTGGGGGCGCG |
| | ID NO: 515) | (Sequence Number: 1850)], and |
| | | transcription adaptations |
| 516 | GCGAGTACCCACAGTACTACCGTTTTAG | PE3 ngRNA (TGG PAM); contains |
| | AGCTAGAAATAGCAAGTTAAAATAAGG | gRNA core SEQ ID NO: 1854, Linker |
| | CTAGTCCGTTATCAACTTGAAAAAGTGG | [AACATTGA (Sequence Number: |
| | CACCGAGTCGGTGCAACATTGACGCGT | 1728)] + Univ. 3′ Motif |
| | CTCTACGTGGGGGCGCGTTTTTTT (SEQ | [CGCGTCTCTACGTGGGGGCGCG |
| | ID NO: 516) | (Sequence Number: 1850)], and |
| | | transcription adaptations |

TABLE 2

| Sequence | | |
|---|---|---|
| Number | Sequence | Description |
| 517 | ACTGTGGGTACTCGAAG (SEQ ID NO: | PEgRNA spacer (TGG PAM) |
| | 517) | |
| 518 | TACTGTGGGTACTCGAAG (SEQ ID NO: | PEgRNA spacer (TGG PAM) |
| | 518) | |
| 519 | GTACTGTGGGTACTCGAAG (SEQ ID NO: | PERNA spacer (TGG PAM) |
| | 519) | |
| 520 | AGTACTGTGGGTACTCGAAG (SEQ ID | PEgRNA spacer (TGG PAM) |
| | NO: 520) | |
| 521 | TAGTACTGTGGGTACTCGAAG (SEQ ID | PERNA spacer (TGG PAM) |
| | NO: 521) | |
| 522 | GTAGTACTGTGGGTACTCGAAG (SEQ ID | PEgRNA spacer (TGG PAM) |
| | NO: 522) | |
| 523 | CGAGT | PBS |
| 524 | CGAGTA | PBS |
| 525 | CGAGTAC | PBS |
| 526 | CGAGTACC | PBS |
| 527 | CGAGTACCC | PBS |
| 528 | CGAGTACCCA (SEQ ID NO: 528) | PBS |
| 529 | CGAGTACCCAC (SEQ ID NO: 529) | PBS |
| 530 | CGAGTACCCACA (SEQ ID NO: 530) | PBS |
| 531 | CGAGTACCCACAG (SEQ ID NO: 531) | PBS |
| 532 | CGAGTACCCACAGT (SEQ ID NO: 532) | PBS |
| 533 | CGAGTACCCACAGTA (SEQ ID NO: 533) | PBS |
| 534 | CGAGTACCCACAGTAC (SEQ ID NO: 534) | PBS |
| 535 | CGAGTACCCACAGTACT (SEQ ID NO: | PBS |
| | 535) | |
| 536 | CGAGTACCCACAGTACTA (SEQ ID NO: | PBS |
| | 536) | |
| 537 | CGAGTACCCACAGTACTAC (SEQ ID NO: | PBS |
| | 537) | |
| 538 | GCAGCCCCTT (SEQ ID NO: 538) | RTT |
| 539 | GCAGTCCCTT (SEQ ID NO: 539) | RTT (TGG-to-GGA PAM silencing |
| | | edit) |
| 540 | GCTCACCCTT (SEQ ID NO: 540) | RTT (TGG-to-GGT PAM silencing |
| | | edit) |
| 541 | GCTCGCCCTT (SEQ ID NO: 541) | RTT (TGG-to-GGC PAM silencing |
| | | edit) |
| 542 | GCTCTCCCTT (SEQ ID NO: 542) | RTT (TGG-to-GGA PAM silencing |
| | | edit) |
| 543 | CGCAGCCCCTT (SEQ ID NO: 543) | RTT |
| 544 | CGCAGTCCCTT (SEQ ID NO: 544) | RTT (TGG-to-GGA PAM silencing |
| | | edit) |
| 545 | CGCTCACCCTT (SEQ ID NO: 545) | RTT (TGG-to-GGT PAM silencing |
| | | edit) |
| 546 | CGCTCGCCCTT (SEQ ID NO: 546) | RTT (TGG-to-GGC PAM silencing |
| | | edit) |
| 547 | CGCTCTCCCTT (SEQ ID NO: 547) | RTT (TGG-to-GGA PAM silencing |
| | | edit) |
| 548 | ACGCAGCCCCTT (SEQ ID NO: 548) | RTT |
| 549 | ACGCAGTCCCTT (SEQ ID NO: 549) | RTT (TGG-to-GGA PAM silencing |
| | | edit) |
| 550 | ACGCTCACCCTT (SEQ ID NO: 550) | RTT (TGG-to-GGT PAM silencing |
| | | edit) |
| 551 | ACGCTCGCCCTT (SEQ ID NO: 551) | RTT (TGG-to-GGC PAM silencing |
| | | edit) |
| 552 | ACGCTCTCCCTT (SEQ ID NO: 552) | RTT (TGG-to-GGA PAM silencing |
| | | edit) |
| 553 | TACGCAGCCCCTT (SEQ ID NO: 553) | RTT |
| 554 | TACGCAGTCCCTT (SEQ ID NO: 554) | RTT (TGG-to-GGA PAM silencing |
| | | edit) |
| 555 | TACGCTCACCCTT (SEQ ID NO: 555) | RTT (TGG-to-GGT PAM silencing |
| | | edit) |
| 556 | TACGCTCGCCCTT (SEQ ID NO: 556) | RTT (TGG-to-GGC PAM silencing |
| | | edit) |
| 557 | TACGCTCTCCCTT (SEQ ID NO: 557) | RTT (TGG-to-GGA PAM silencing |
| | | edit) |
| 558 | GTACGCAGCCCCTT (SEQ ID NO: 558) | RTT |
| 559 | GTACGCAGTCCCTT (SEQ ID NO: 559) | RTT (TGG-to-GGA PAM silencing |
| | | edit) |
| 560 | GTACGCTCACCCTT (SEQ ID NO: 560) | RTT (TGG-to-GGT PAM silencing |
| | | edit) |
| 561 | GTACGCTCGCCCTT (SEQ ID NO: 561) | RTT (TGG-to-GGC PAM silencing |
| | | edit) |
| 562 | GTACGCTCTCCCTT (SEQ ID NO: 562) | RTT (TGG-to-GGA PAM silencing |
| | | edit) |
| 563 | GGTACGCAGCCCCTT (SEQ ID NO: 563) | RTT |
| 564 | GGTACGCAGTCCCTT (SEQ ID NO: 564) | RTT (TGG-to-GGA PAM silencing |
| | | edit) |
| 565 | GGTACGCTCACCCTT (SEQ ID NO: 565) | RTT (TGG-to-GGT PAM silencing |
| | | edit) |
| 566 | GGTACGCTCGCCCTT (SEQ ID NO: 566) | RTT (TGG-to-GGC PAM silencing |
| | | edit) |
| 567 | GGTACGCTCTCCCTT (SEQ ID NO: 567) | RTT (TGG-to-GGA PAM silencing |
| | | edit) |
| 568 | TGGTACGCAGCCCCTT (SEQ ID NO: 568) | RTT |
| 569 | TGGTACGCAGTCCCTT (SEQ ID NO: 569) | RTT (TGG-to-GGA PAM silencing |
| | | edit) |
| 570 | TGGTACGCTCACCCTT (SEQ ID NO: 570) | RTT (TGG-to-GGT PAM silencing |
| | | edit) |
| 571 | TGGTACGCTCGCCCTT (SEQ ID NO: 571) | RTT (TGG-to-GGC PAM silencing |
| | | edit) |
| 572 | TGGTACGCTCTCCCTT (SEQ ID NO: 572) | RTT (TGG-to-GGA PAM silencing |
| | | edit) |
| 573 | GTGGTACGCAGCCCCTT (SEQ ID NO: | RTT |
| | 573) | |
| 574 | GTGGTACGCAGTCCCTT (SEQ ID NO: | RTT (TGG-to-GGA PAM silencing |
| | 574) | edit) |
| 575 | GTGGTACGCTCACCCTT (SEQ ID NO: | RTT (TGG-to-GGT PAM silencing |
| | 575) | edit) |
| 576 | GTGGTACGCTCGCCCTT (SEQ ID NO: | RTT (TGG-to-GGC PAM silencing |
| | 576) | edit) |
| 577 | GTGGTACGCTCTCCCTT (SEQ ID NO: | RTT (TGG-to-GGA PAM silencing |
| | 577) | edit) |
| 578 | TGTGGTACGCAGCCCCTT (SEQ ID NO: | RTT |
| | 578) | |
| 579 | TGTGGTACGCAGTCCCTT (SEQ ID NO: | RTT (TGG-to-GGA PAM silencing |
| | 579) | edit) |
| 580 | TGTGGTACGCTCACCCTT (SEQ ID NO: | RTT (TGG-to-GGT PAM silencing |
| | 580) | edit) |
| 581 | TGTGGTACGCTCGCCCTT (SEQ ID NO: | RTT (TGG-to-GGC PAM silencing |
| | 581) | edit) |
| 582 | TGTGGTACGCTCTCCCTT (SEQ ID NO: | RTT (TGG-to-GGA PAM silencing |
| | 582) | edit) |
| 583 | GTGTGGTACGCAGCCCCTT (SEQ ID NO: | RTT |
| | 583) | |
| 584 | GTGTGGTACGCAGTCCCTT (SEQ ID NO: | RTT (TGG-to-GGA PAM silencing |
| | 584) | edit) |
| 585 | GTGTGGTACGCTCACCCTT (SEQ ID NO: | RTT (TGG-to-GGT PAM silencing |
| | 585) | edit) |
| 586 | GTGTGGTACGCTCGCCCTT (SEQ ID NO: | RTT (TGG-to-GGC PAM silencing |
| | 586) | edit) |
| 587 | GTGTGGTACGCTCTCCCTT (SEQ ID NO: | RTT (TGG-to-GGA PAM silencing |
| | 587) | edit) |
| 588 | GGTGTGGTACGCAGCCCCTT (SEQ ID | RTT |
| | NO: 588) | |
| 589 | GGTGTGGTACGCAGTCCCTT (SEQ ID | RTT (TGG-to-GGA PAM silencing |
| | NO: 589) | edit) |
| 590 | GGTGTGGTACGCTCACCCTT (SEQ ID | RTT (TGG-to-GGT PAM silencing |
| | NO: 590) | edit) |
| 591 | GGTGTGGTACGCTCGCCCTT (SEQ ID | RTT (TGG-to-GGC PAM silencing |
| | NO: 591) | edit) |
| 592 | GGTGTGGTACGCTCTCCCTT (SEQ ID | RTT (TGG-to-GGA PAM silencing |
| | NO: 592) | edit) |
| 593 | GGGTGTGGTACGCAGCCCCTT (SEQ ID | RTT |
| | NO: 593) | |
| 594 | GGGTGTGGTACGCAGTCCCTT (SEQ ID | RTT (TGG-to-GGA PAM silencing |
| | NO: 594) | edit) |
| 595 | GGGTGTGGTACGCTCACCCTT (SEQ ID | RTT (TGG-to-GGT PAM silencing |
| | NO: 595) | edit) |
| 596 | GGGTGTGGTACGCTCGCCCTT (SEQ ID | RTT (TGG-to-GGC PAM silencing |
| | NO: 596) | edit) |
| 597 | GGGTGTGGTACGCTCTCCCTT (SEQ ID | RTT (TGG-to-GGA PAM silencing |
| | NO: 597) | edit) |
| 598 | CGGGTGTGGTACGCAGCCCCTT (SEQ ID | RTT |
| | NO: 598) | |
| 599 | CGGGTGTGGTACGCAGTCCCTT (SEQ ID | RTT (TGG-to-GGA PAM silencing |
| | NO: 599) | edit) |
| 600 | CGGGTGTGGTACGCTCACCCTT (SEQ ID | RTT (TGG-to-GGT PAM silencing |
| | NO: 600) | edit) |
| 601 | CGGGTGTGGTACGCTCGCCCTT (SEQ ID | RTT (TGG-to-GGC PAM silencing |
| | NO: 601) | edit) |
| 602 | CGGGTGTGGTACGCTCTCCCTT (SEQ ID | RTT (TGG-to-GGA PAM silencing |
| | NO: 602) | edit) |
| 603 | ACGGGTGTGGTACGCAGCCCCTT (SEQ | RTT |
| | ID NO: 603) | |
| 604 | ACGGGTGTGGTACGCAGTCCCTT (SEQ | RTT (TGG-to-GGA PAM silencing |
| | ID NO: 604) | edit) |
| 605 | ACGGGTGTGGTACGCTCACCCTT (SEQ | RTT (TGG-to-GGT PAM silencing |
| | ID NO: 605) | edit) |
| 606 | ACGGGTGTGGTACGCTCGCCCTT (SEQ | RTT (TGG-to-GGC PAM silencing |
| | ID NO: 606) | edit) |
| 607 | ACGGGTGTGGTACGCTCTCCCTT (SEQ | RTT (TGG-to-GGA PAM silencing |
| | ID NO: 607) | edit) |
| 608 | GACGGGTGTGGTACGCAGCCCCTT (SEQ | RTT |
| | ID NO: 608) | |
| 609 | GACGGGTGTGGTACGCAGTCCCTT (SEQ | RTT (TGG-to-GGA PAM silencing |
| | ID NO: 609) | edit) |
| 610 | GACGGGTGTGGTACGCTCACCCTT (SEQ | RTT (TGG-to-GGT PAM silencing |
| | ID NO: 610) | edit) |
| 611 | GACGGGTGTGGTACGCTCGCCCTT (SEQ | RTT (TGG-to-GGC PAM silencing |
| | ID NO: 611) | edit) |
| 612 | GACGGGTGTGGTACGCTCTCCCTT (SEQ | RTT (TGG-to-GGA PAM silencing |
| | ID NO: 612) | edit) |
| 613 | CGACGGGTGTGGTACGCAGCCCCTT | RTT |
| | (SEQ ID NO: 613) | |
| 614 | CGACGGGTGTGGTACGCAGTCCCTT | RTT (TGG-to-GGA PAM silencing |
| | (SEQ ID NO: 614) | edit) |
| 615 | CGACGGGTGTGGTACGCTCACCCTT | RTT (TGG-to-GGT PAM silencing |
| | (SEQ ID NO: 615) | edit) |
| 616 | CGACGGGTGTGGTACGCTCGCCCTT | RTT (TGG-to-GGC PAM silencing |
| | (SEQ ID NO: 616) | edit) |
| 617 | CGACGGGTGTGGTACGCTCTCCCTT | RTT (TGG-to-GGA PAM silencing |
| | (SEQ ID NO: 617) | edit) |
| 618 | GCGACGGGTGTGGTACGCAGCCCCTT | RTT |
| | (SEQ ID NO: 618) | |
| 619 | GCGACGGGTGTGGTACGCAGTCCCTT | RTT (TGG-to-GGA PAM silencing |
| | (SEQ ID NO: 619) | edit) |
| 620 | GCGACGGGTGTGGTACGCTCACCCTT | RTT (TGG-to-GGT PAM silencing |
| | (SEQ ID NO: 620) | edit) |
| 621 | GCGACGGGTGTGGTACGCTCGCCCTT | RTT (TGG-to-GGC PAM silencing |
| | (SEQ ID NO: 621) | edit) |
| 622 | GCGACGGGTGTGGTACGCTCTCCCTT | RTT (TGG-to-GGA PAM silencing |
| | (SEQ ID NO: 622) | edit) |
| 623 | TGCGACGGGTGTGGTACGCAGCCCCTT | RTT |
| | (SEQ ID NO: 623) | |
| 624 | TGCGACGGGTGTGGTACGCAGTCCCTT | RTT (TGG-to-GGA PAM silencing |
| | (SEQ ID NO: 624) | edit) |
| 625 | TGCGACGGGTGTGGTACGCTCACCCTT | RTT (TGG-to-GGT PAM silencing |
| | (SEQ ID NO: 625) | edit) |
| 626 | TGCGACGGGTGTGGTACGCTCGCCCTT | RTT (TGG-to-GGC PAM silencing |
| | (SEQ ID NO: 626) | edit) |
| 627 | TGCGACGGGTGTGGTACGCTCTCCCTT | RTT (TGG-to-GGA PAM silencing |
| | (SEQ ID NO: 627) | edit) |
| 628 | ATGCGACGGGTGTGGTACGCAGCCCCT | RTT |
| | T (SEQ ID NO: 628) | |
| 629 | ATGCGACGGGTGTGGTACGCAGTCCCTT | RTT (TGG-to-GGA PAM silencing |
| | (SEQ ID NO: 629) | edit) |
| 630 | ATGCGACGGGTGTGGTACGCTCACCCTT | RTT (TGG-to-GGT PAM silencing |
| | (SEQ ID NO: 630) | edit) |
| 631 | ATGCGACGGGTGTGGTACGCTCGCCCTT | RTT (TGG-to-GGC PAM silencing |
| | (SEQ ID NO: 631) | edit) |
| 632 | ATGCGACGGGTGTGGTACGCTCTCCCTT | RTT (TGG-to-GGA PAM silencing |
| | (SEQ ID NO: 632) | edit) |
| 633 | AATGCGACGGGTGTGGTACGCAGCCCC | RTT |
| | TT (SEQ ID NO: 633) | |
| 634 | AATGCGACGGGTGTGGTACGCAGTCCC | RTT (TGG-to-GGA PAM silencing |
| | TT (SEQ ID NO: 634) | edit) |
| 635 | AATGCGACGGGTGTGGTACGCTCACCC | RTT (TGG-to-GGT PAM silencing |
| | TT (SEQ ID NO: 635) | edit) |
| 636 | AATGCGACGGGTGTGGTACGCTCGCCC | RTT (TGG-to-GGC PAM silencing |
| | TT (SEQ ID NO: 636) | edit) |
| 637 | AATGCGACGGGTGTGGTACGCTCTCCCT | RTT (TGG-to-GGA PAM silencing |
| | T (SEQ ID NO: 637) | edit) |
| 638 | CAATGCGACGGGTGTGGTACGCAGCCC | RTT |
| | CTT (SEQ ID NO: 638) | |
| 639 | CAATGCGACGGGTGTGGTACGCAGTCC | RTT (TGG-to-GGA PAM silencing |
| | CTT (SEQ ID NO: 639) | edit) |
| 640 | CAATGCGACGGGTGTGGTACGCTCACC | RTT (TGG-to-GGT PAM silencing |
| | CTT (SEQ ID NO: 640) | edit) |
| 641 | CAATGCGACGGGTGTGGTACGCTCGCC | RTT (TGG-to-GGC PAM silencing |
| | CTT (SEQ ID NO: 641) | edit) |
| 642 | CAATGCGACGGGTGTGGTACGCTCTCCC | RTT (TGG-to-GGA PAM silencing |
| | TT (SEQ ID NO: 642) | edit) |
| 643 | CCAATGCGACGGGTGTGGTACGCAGCC | RTT |
| | CCTT (SEQ ID NO: 643) | |
| 644 | CCAATGCGACGGGTGTGGTACGCAGTC | RTT (TGG-to-GGA PAM silencing |
| | CCTT (SEQ ID NO: 644) | edit) |
| 645 | CCAATGCGACGGGTGTGGTACGCTCAC | RTT (TGG-to-GGT PAM silencing |
| | CCTT (SEQ ID NO: 645) | edit) |
| 646 | CCAATGCGACGGGTGTGGTACGCTCGC | RTT (TGG-to-GGC PAM silencing |
| | CCTT (SEQ ID NO: 646) | edit) |
| 647 | CCAATGCGACGGGTGTGGTACGCTCTCC | RTT (TGG-to-GGA PAM silencing |
| | CTT (SEQ ID NO: 647) | edit) |
| 648 | TCCAATGCGACGGGTGTGGTACGCAGC | RTT |
| | CCCTT (SEQ ID NO: 648) | |
| 649 | TCCAATGCGACGGGTGTGGTACGCAGT | RTT (TGG-to-GGA PAM silencing |
| | CCCTT (SEQ ID NO: 649) | edit) |
| 650 | TCCAATGCGACGGGTGTGGTACGCTCA | RTT (TGG-to-GGT PAM silencing |
| | CCCTT (SEQ ID NO: 650) | edit) |
| 651 | TCCAATGCGACGGGTGTGGTACGCTCG | RTT (TGG-to-GGC PAM silencing |
| | CCCTT (SEQ ID NO: 651) | edit) |
| 652 | TCCAATGCGACGGGTGTGGTACGCTCTC | RTT (TGG-to-GGA PAM silencing |
| | CCTT (SEQ ID NO: 652) | edit) |
| 653 | CTCCAATGCGACGGGTGTGGTACGCAG | RTT |
| | CCCCTT (SEQ ID NO: 653) | |
| 654 | CTCCAATGCGACGGGTGTGGTACGCAG | RTT (TGG-to-GGA PAM silencing |
| | TCCCTT (SEQ ID NO: 654) | edit) |
| 655 | CTCCAATGCGACGGGTGTGGTACGCTC | RTT (TGG-to-GGT PAM silencing |
| | ACCCTT (SEQ ID NO: 655) | edit) |
| 656 | CTCCAATGCGACGGGTGTGGTACGCTC | RTT (TGG-to-GGC PAM silencing |
| | GCCCTT (SEQ ID NO: 656) | edit) |
| 657 | CTCCAATGCGACGGGTGTGGTACGCTCT | RTT (TGG-to-GGA PAM silencing |
| | CCCTT (SEQ ID NO: 657) | edit) |
| 658 | TCTCCAATGCGACGGGTGTGGTACGCA | RTT |
| | GCCCCTT (SEQ ID NO: 658) | |
| 659 | TCTCCAATGCGACGGGTGTGGTACGCA | RTT (TGG-to-GGA PAM silencing |
| | GTCCCTT (SEQ ID NO: 659) | edit) |
| 660 | TCTCCAATGCGACGGGTGTGGTACGCTC | RTT (TGG-to-GGT PAM silencing |
| | ACCCTT (SEQ ID NO: 660) | edit) |
| 661 | TCTCCAATGCGACGGGTGTGGTACGCTC | RTT (TGG-to-GGC PAM silencing |
| | GCCCTT (SEQ ID NO: 661) | edit) |
| 662 | TCTCCAATGCGACGGGTGTGGTACGCTC | RTT (TGG-to-GGA PAM silencing |
| | TCCCTT (SEQ ID NO: 662) | edit) |
| 663 | TTCTCCAATGCGACGGGTGTGGTACGCA | RTT |
| | GCCCCTT (SEQ ID NO: 663) | |
| 664 | TTCTCCAATGCGACGGGTGTGGTACGCA | RTT (TGG-to-GGA PAM silencing |
| | GTCCCTT (SEQ ID NO: 664) | edit) |
| 665 | TTCTCCAATGCGACGGGTGTGGTACGCT | RTT (TGG-to-GGT PAM silencing |
| | CACCCTT (SEQ ID NO: 665) | edit) |
| 666 | TTCTCCAATGCGACGGGTGTGGTACGCT | RTT (TGG-to-GGC PAM silencing |
| | CGCCCTT (SEQ ID NO: 666) | edit) |
| 667 | TTCTCCAATGCGACGGGTGTGGTACGCT | RTT (TGG-to-GGA PAM silencing |
| | CTCCCTT (SEQ ID NO: 667) | edit) |
| 668 | CTTCTCCAATGCGACGGGTGTGGTACGC | RTT |
| | AGCCCCTT (SEQ ID NO: 668) | |
| 669 | CTTCTCCAATGCGACGGGTGTGGTACGC | RTT (TGG-to-GGA PAM silencing |
| | AGTCCCTT (SEQ ID NO: 669) | edit) |
| 670 | CTTCTCCAATGCGACGGGTGTGGTACGC | RTT (TGG-to-GGT PAM silencing |
| | TCACCCTT (SEQ ID NO: 670) | edit) |
| 671 | CTTCTCCAATGCGACGGGTGTGGTACGC | RTT (TGG-to-GGC PAM silencing |
| | TCGCCCTT (SEQ ID NO: 671) | edit) |
| 672 | CTTCTCCAATGCGACGGGTGTGGTACGC | RTT (TGG-to-GGA PAM silencing |
| | TCTCCCTT (SEQ ID NO: 672) | edit) |
| 673 | CCTTCTCCAATGCGACGGGTGTGGTACG | RTT |
| | CAGCCCCTT (SEQ ID NO: 673) | |
| 674 | CCTTCTCCAATGCGACGGGTGTGGTACG | RTT (TGG-to-GGA PAM silencing |
| | CAGTCCCTT (SEQ ID NO: 674) | edit) |
| 675 | CCTTCTCCAATGCGACGGGTGTGGTACG | RTT (TGG-to-GGT PAM silencing |
| | CTCACCCTT (SEQ ID NO: 675) | edit) |
| 676 | CCTTCTCCAATGCGACGGGTGTGGTACG | RTT (TGG-to-GGC PAM silencing |
| | CTCGCCCTT (SEQ ID NO: 676) | edit) |
| 677 | CCTTCTCCAATGCGACGGGTGTGGTACG | RTT (TGG-to-GGA PAM silencing |
| | CTCTCCCTT (SEQ ID NO: 677) | edit) |
| 678 | CCCTTCTCCAATGCGACGGGTGTGGTAC | RTT |
| | GCAGCCCCTT (SEQ ID NO: 678) | |
| 679 | CCCTTCTCCAATGCGACGGGTGTGGTAC | RTT (TGG-to-GGA PAM silencing |
| | GCAGTCCCTT (SEQ ID NO: 679) | edit) |
| 680 | CCCTTCTCCAATGCGACGGGTGTGGTAC | RTT (TGG-to-GGT PAM silencing |
| | GCTCACCCTT (SEQ ID NO: 680) | edit) |
| 681 | CCCTTCTCCAATGCGACGGGTGTGGTAC | RTT (TGG-to-GGC PAM silencing |
| | GCTCGCCCTT (SEQ ID NO: 681) | edit) |
| 682 | CCCTTCTCCAATGCGACGGGTGTGGTAC | RTT (TGG-to-GGA PAM silencing |
| | GCTCTCCCTT (SEQ ID NO: 682) | edit) |
| 683 | GCCCTTCTCCAATGCGACGGGTGTGGTA | RTT |
| | CGCAGCCCCTT (SEQ ID NO: 683) | |
| 684 | GCCCTTCTCCAATGCGACGGGTGTGGTA | RTT (TGG-to-GGA PAM silencing |
| | CGCAGTCCCTT (SEQ ID NO: 684) | edit) |
| 685 | GCCCTTCTCCAATGCGACGGGTGTGGTA | RTT (TGG-to-GGT PAM silencing |
| | CGCTCACCCTT (SEQ ID NO: 685) | edit) |
| 686 | GCCCTTCTCCAATGCGACGGGTGTGGTA | RTT (TGG-to-GGC PAM silencing |
| | CGCTCGCCCTT (SEQ ID NO: 686) | edit) |
| 687 | GCCCTTCTCCAATGCGACGGGTGTGGTA | RTT (TGG-to-GGA PAM silencing |
| | CGCTCTCCCTT (SEQ ID NO: 687) | edit) |
| 688 | TGCCCTTCTCCAATGCGACGGGTGTGGT | RTT |
| | ACGCAGCCCCTT (SEQ ID NO: 688) | |
| 689 | TGCCCTTCTCCAATGCGACGGGTGTGGT | RTT (TGG-to-GGA PAM silencing |
| | ACGCAGTCCCTT (SEQ ID NO: 689) | edit) |
| 690 | TGCCCTTCTCCAATGCGACGGGTGTGGT | RTT (TGG-to-GGT PAM silencing |
| | ACGCTCACCCTT (SEQ ID NO: 690) | edit) |
| 691 | TGCCCTTCTCCAATGCGACGGGTGTGGT | RTT (TGG-to-GGC PAM silencing |
| | ACGCTCGCCCTT (SEQ ID NO: 691) | edit) |
| 692 | TGCCCTTCTCCAATGCGACGGGTGTGGT | RTT (TGG-to-GGA PAM silencing |
| | ACGCTCTCCCTT (SEQ ID NO: 692) | edit) |
| 72 | ACAAGGGCCACAGCCATGAA (SEQ ID | PE3 ngRNA spacer (TGG PAM) |
| | NO: 72) | |
| 73 | ACAGCCATGAATGGCACAGA (SEQ ID | PE3 ngRNA spacer (AGG PAM) |
| | NO: 73) | |
| 74 | CAGCCACGGGTCAGCCACAA (SEQ ID | PE3 ngRNA spacer (GGG PAM) |
| | NO: 74) | |
| 693 | CAGGCCTTCGCAGCATTCTT (SEQ ID | PE3 ngRNA spacer (GGG PAM) |
| | NO: 693) | |
| 694 | CCTTCGCAGCATTCTTGGGT (SEQ ID | PE3 ngRNA spacer (GGG PAM) |
| | NO: 694) | |
| 75 | CGTGCCCTTCTCCAATGCGA (SEQ ID | PE3 ngRNA spacer (CGG PAM) |
| | NO: 75) | |
| 76 | CTTCTCCAATGCGACGGGTG (SEQ ID | PE3 ngRNA spacer (TGG PAM) |
| | NO: 76) | |
| 77 | GCAGCCACGGGTCAGCCACA (SEQ ID | PE3 ngRNA spacer (AGG PAM) |
| | NO: 77) | |
| 695 | GCCTTCGCAGCATTCTTGGG (SEQ ID | PE3 ngRNA spacer (TGG PAM) |
| | NO: 695) | |
| 78 | GTGCCCTTCTCCAATGCGAC (SEQ ID | PE3 ngRNA spacer (GGG PAM) |
| | NO: 78) | |
| 696 | TCAGGCCTTCGCAGCATTCT (SEQ ID | PE3 ngRNA spacer (TGG PAM) |
| | NO: 696) | |
| 79 | TCTTGGGTGGGAGCAGCCAC (SEQ ID | PE3 ngRNA spacer (GGG PAM) |
| | NO: 79) | |
| 80 | TTCTTGGGTGGGAGCAGCCA (SEQ ID | PE3 ngRNA spacer (CGG PAM) |
| | NO: 80) | |
| 697 | AGTACTGTGGGTACTCGAAGGTTTTAGA | pegRNA; contains gRNA core SEQ ID |
| | GCTAGAAATAGCAAGTTAAAATAAGGC | NO: 1854 |
| | TAGTCCGTTATCAACTTGAAAAAGTGGC | |
| | ACCGAGTCGGTGCGCAGCCCCTTCGAG | |
| | TACC (SEQ ID NO: 697) | |
| 698 | AGTACTGTGGGTACTCGAAGGTTTTAGA | pegRNA; contains gRNA core SEQ ID |
| | GCTAGAAATAGCAAGTTAAAATAAGGC | NO: 1854 |
| | TAGTCCGTTATCAACTTGAAAAAGTGGC | |
| | ACCGAGTCGGTGCACGCAGCCCCTTCG | |
| | AGTACC (SEQ ID NO: 698) | |
| 699 | AGTACTGTGGGTACTCGAAGGTTTTAGA | pegRNA; contains gRNA core SEQ ID |
| | GCTAGAAATAGCAAGTTAAAATAAGGC | NO: 1854 |
| | TAGTCCGTTATCAACTTGAAAAAGTGGC | |
| | ACCGAGTCGGTGCGCAGCCCCTTCGAG | |
| | TACCCA (SEQ ID NO: 699) | |
| 700 | AGTACTGTGGGTACTCGAAGGTTTTAGA | pegRNA; contains gRNA core SEQ ID |
| | GCTAGAAATAGCAAGTTAAAATAAGGC | NO: 1854, and TTTT (sequence number |
| | TAGTCCGTTATCAACTTGAAAAAGTGGC | 1860) 3′ terminal sequence |
| | ACCGAGTCGGTGCGCAGCCCCTTCGAG | |
| | TACCTTTT (SEQ ID NO: 700) | |
| 701 | AGTACTGTGGGTACTCGAAGGTTTTAGA | pegRNA; contains gRNA core SEQ ID |
| | GCTAGAAATAGCAAGTTAAAATAAGGC | NO: 1854 |
| | TAGTCCGTTATCAACTTGAAAAAGTGGC | |
| | ACCGAGTCGGTGCGTACGCAGCCCCTTC | |
| | GAGTACC (SEQ ID NO: 701) | |
| 702 | AGTACTGTGGGTACTCGAAGGTTTTAGA | pegRNA; contains gRNA core SEQ ID |
| | GCTAGAAATAGCAAGTTAAAATAAGGC | NO: 1854 |
| | TAGTCCGTTATCAACTTGAAAAAGTGGC | |
| | ACCGAGTCGGTGCACGCAGCCCCTTCG | |
| | AGTACCCA (SEQ ID NO: 702) | |
| 703 | AGTACTGTGGGTACTCGAAGGTTTTAGA | pegRNA; contains gRNA core SEQ ID |
| | GCTAGAAATAGCAAGTTAAAATAAGGC | NO: 1854 |
| | TAGTCCGTTATCAACTTGAAAAAGTGGC | |
| | ACCGAGTCGGTGCGCAGCCCCTTCGAG | |
| | TACCCACA (SEQ ID NO: 703) | |
| 704 | AGTACTGTGGGTACTCGAAGGTTTTAGA | pegRNA; contains gRNA core SEQ ID |
| | GCTAGAAATAGCAAGTTAAAATAAGGC | NO: 1854, and TTTT (sequence number |
| | TAGTCCGTTATCAACTTGAAAAAGTGGC | 1860) 3′ terminal sequence |
| | ACCGAGTCGGTGCACGCAGCCCCTTCG | |
| | AGTACCTTTT (SEQ ID NO: 704) | |
| 705 | AGTACTGTGGGTACTCGAAGGTTTTAGA | pegRNA; contains gRNA core SEQ ID |
| | GCTAGAAATAGCAAGTTAAAATAAGGC | NO: 1854, and TTTT (sequence number |
| | TAGTCCGTTATCAACTTGAAAAAGTGGC | 1860) 3′ terminal sequence |
| | ACCGAGTCGGTGCGCAGCCCCTTCGAG | |
| | TACCCATTTT (SEQ ID NO: 705) | |
| 706 | AGTACTGTGGGTACTCGAAGGTTTTAGA | pegRNA; contains gRNA core SEQ ID |
| | GCTAGAAATAGCAAGTTAAAATAAGGC | NO: 1854 |
| | TAGTCCGTTATCAACTTGAAAAAGTGGC | |
| | ACCGAGTCGGTGCTGGTACGCAGCCCC | |
| | TTCGAGTACC (SEQ ID NO: 706) | |
| 707 | AGTACTGTGGGTACTCGAAGGTTTTAGA | pegRNA; contains gRNA core SEQ ID |
| | GCTAGAAATAGCAAGTTAAAATAAGGC | NO: 1854 |
| | TAGTCCGTTATCAACTTGAAAAAGTGGC | |
| | ACCGAGTCGGTGCGTACGCAGCCCCTTC | |
| | GAGTACCCA (SEQ ID NO: 707) | |
| 708 | AGTACTGTGGGTACTCGAAGGTTTTAGA | pegRNA; contains gRNA core SEQ ID |
| | GCTAGAAATAGCAAGTTAAAATAAGGC | NO: 1854 |
| | TAGTCCGTTATCAACTTGAAAAAGTGGC | |
| | ACCGAGTCGGTGCACGCAGCCCCTTCG | |
| | AGTACCCACA (SEQ ID NO: 708) | |
| 709 | AGTACTGTGGGTACTCGAAGGTTTTAGA | pegRNA; contains gRNA core SEQ ID |
| | GCTAGAAATAGCAAGTTAAAATAAGGC | NO: 1854 |
| | TAGTCCGTTATCAACTTGAAAAAGTGGC | |
| | ACCGAGTCGGTGCGCAGCCCCTTCGAG | |
| | TACCCACAGT (SEQ ID NO: 709) | |
| 710 | AGTACTGTGGGTACTCGAAGGTTTTAGA | pegRNA; contains gRNA core SEQ ID |
| | GCTAGAAATAGCAAGTTAAAATAAGGC | NO: 1854, and TTTT (sequence number |
| | TAGTCCGTTATCAACTTGAAAAAGTGGC | 1860) 3′ terminal sequence |
| | ACCGAGTCGGTGCGTACGCAGCCCCTTC | |
| | GAGTACCTTTT (SEQ ID NO: 710) | |
| 711 | AGTACTGTGGGTACTCGAAGGTTTTAGA | pegRNA; contains gRNA core SEQ ID |
| | GCTAGAAATAGCAAGTTAAAATAAGGC | NO: 1854, and TTTT (sequence number |
| | TAGTCCGTTATCAACTTGAAAAAGTGGC | 1860) 3′ terminal sequence |
| | ACCGAGTCGGTGCACGCAGCCCCTTCG | |
| | AGTACCCATTTT (SEQ ID NO: 711) | |
| 712 | AGTACTGTGGGTACTCGAAGGTTTTAGA | pegRNA; contains gRNA core SEQ ID |
| | GCTAGAAATAGCAAGTTAAAATAAGGC | NO: 1854, and TTTT (sequence number |
| | TAGTCCGTTATCAACTTGAAAAAGTGGC | 1860) 3′ terminal sequence |
| | ACCGAGTCGGTGCGCAGCCCCTTCGAG | |
| | TACCCACATTTT (SEQ ID NO: 712) | |
| 713 | AGTACTGTGGGTACTCGAAGGTTTTAGA | pegRNA; contains gRNA core SEQ ID |
| | GCTAGAAATAGCAAGTTAAAATAAGGC | NO: 1854 |
| | TAGTCCGTTATCAACTTGAAAAAGTGGC | |
| | ACCGAGTCGGTGCTGGTACGCAGCCCC | |
| | TTCGAGTACCCA (SEQ ID NO: 713) | |
| 714 | AGTACTGTGGGTACTCGAAGGTTTTAGA | pegRNA; contains gRNA core SEQ ID |
| | GCTAGAAATAGCAAGTTAAAATAAGGC | NO: 1854 |
| | TAGTCCGTTATCAACTTGAAAAAGTGGC | |
| | ACCGAGTCGGTGCGTACGCAGCCCCTTC | |
| | GAGTACCCACA (SEQ ID NO: 714) | |
| 715 | AGTACTGTGGGTACTCGAAGGTTTTAGA | pegRNA; contains gRNA core SEQ ID |
| | GCTAGAAATAGCAAGTTAAAATAAGGC | NO: 1854 |
| | TAGTCCGTTATCAACTTGAAAAAGTGGC | |
| | ACCGAGTCGGTGCACGCAGCCCCTTCG | |
| | AGTACCCACAGT (SEQ ID NO: 715) | |
| 716 | AGTACTGTGGGTACTCGAAGGTTTTAGA | pegRNA; contains gRNA core SEQ ID |
| | GCTAGAAATAGCAAGTTAAAATAAGGC | NO: 1854, and TTTT (sequence number |
| | TAGTCCGTTATCAACTTGAAAAAGTGGC | 1860) 3′ terminal sequence |
| | ACCGAGTCGGTGCTGGTACGCAGCCCC | |
| | TTCGAGTACCTTTT (SEQ ID NO: 716) | |
| 717 | AGTACTGTGGGTACTCGAAGGTTTTAGA | pegRNA; contains gRNA core SEQ ID |
| | GCTAGAAATAGCAAGTTAAAATAAGGC | NO: 1854, and TTTT (sequence number |
| | TAGTCCGTTATCAACTTGAAAAAGTGGC | 1860) 3′ terminal sequence |
| | ACCGAGTCGGTGCGTACGCAGCCCCTTC | |
| | GAGTACCCATTTT (SEQ ID NO: 717) | |
| 718 | AGTACTGTGGGTACTCGAAGGTTTTAGA | pegRNA; contains gRNA core SEQ ID |
| | GCTAGAAATAGCAAGTTAAAATAAGGC | NO: 1854, and TTTT (sequence number |
| | TAGTCCGTTATCAACTTGAAAAAGTGGC | 1860) 3′ terminal sequence |
| | ACCGAGTCGGTGCACGCAGCCCCTTCG | |
| | AGTACCCACATTTT (SEQ ID NO: 718) | |
| 719 | AGTACTGTGGGTACTCGAAGGTTTTAGA | pegRNA; contains gRNA core SEQ ID |
| | GCTAGAAATAGCAAGTTAAAATAAGGC | NO: 1854, and TTTT (sequence number |
| | TAGTCCGTTATCAACTTGAAAAAGTGGC | 1860) 3′ terminal sequence |
| | ACCGAGTCGGTGCGCAGCCCCTTCGAG | |
| | TACCCACAGTTTTT (SEQ ID NO: 719) | |
| 720 | AGTACTGTGGGTACTCGAAGGTTTTAGA | pegRNA; contains gRNA core SEQ ID |
| | GCTAGAAATAGCAAGTTAAAATAAGGC | NO: 1854 |
| | TAGTCCGTTATCAACTTGAAAAAGTGGC | |
| | ACCGAGTCGGTGCTGGTACGCAGCCCC | |
| | TTCGAGTACCCACA (SEQ ID NO: 720) | |
| 721 | AGTACTGTGGGTACTCGAAGGTTTTAGA | pegRNA; contains gRNA core SEQ ID |
| | GCTAGAAATAGCAAGTTAAAATAAGGC | NO: 1854 |
| | TAGTCCGTTATCAACTTGAAAAAGTGGC | |
| | ACCGAGTCGGTGCGTACGCAGCCCCTTC | |
| | GAGTACCCACAGT (SEQ ID NO: 721) | |
| 722 | AGTACTGTGGGTACTCGAAGGTTTTAGA | pegRNA; contains gRNA core SEQ ID |
| | GCTAGAAATAGCAAGTTAAAATAAGGC | NO: 1854, and TTTT (sequence number |
| | TAGTCCGTTATCAACTTGAAAAAGTGGC | 1860) 3′ terminal sequence |
| | ACCGAGTCGGTGCTGGTACGCAGCCCC | |
| | TTCGAGTACCCATTTT (SEQ ID NO: 722) | |
| 723 | AGTACTGTGGGTACTCGAAGGTTTTAGA | pegRNA; contains gRNA core SEQ ID |
| | GCTAGAAATAGCAAGTTAAAATAAGGC | NO: 1854, and TTTT (sequence number |
| | TAGTCCGTTATCAACTTGAAAAAGTGGC | 1860) 3′ terminal sequence |
| | ACCGAGTCGGTGCGTACGCAGCCCCTTC | |
| | GAGTACCCACATTTT (SEQ ID NO: 723) | |
| 724 | AGTACTGTGGGTACTCGAAGGTTTTAGA | pegRNA; contains gRNA core SEQ ID |
| | GCTAGAAATAGCAAGTTAAAATAAGGC | NO: 1854, and TTTT (sequence number |
| | TAGTCCGTTATCAACTTGAAAAAGTGGC | 1860) 3′ terminal sequence |
| | ACCGAGTCGGTGCACGCAGCCCCTTCG | |
| | AGTACCCACAGTTTTT (SEQ ID NO: 724) | |
| 725 | AGTACTGTGGGTACTCGAAGGTTTTAGA | pegRNA; contains gRNA core SEQ ID |
| | GCTAGAAATAGCAAGTTAAAATAAGGC | NO: 1854 |
| | TAGTCCGTTATCAACTTGAAAAAGTGGC | |
| | ACCGAGTCGGTGCTGGTACGCAGCCCC | |
| | TTCGAGTACCCACAGT (SEQ ID NO: 725) | |
| 726 | AGTACTGTGGGTACTCGAAGGTTTTAGA | pegRNA; contains gRNA core SEQ ID |
| | GCTAGAAATAGCAAGTTAAAATAAGGC | NO: 1854, and TTTT (sequence number |
| | TAGTCCGTTATCAACTTGAAAAAGTGGC | 1860) 3′ terminal sequence |
| | ACCGAGTCGGTGCTGGTACGCAGCCCC | |
| | TTCGAGTACCCACATTTT (SEQ ID NO: | |
| | 726) | |
| 727 | AGTACTGTGGGTACTCGAAGGTTTTAGA | pegRNA; contains gRNA core SEQ ID |
| | GCTAGAAATAGCAAGTTAAAATAAGGC | NO: 1854, and TTTT (sequence number |
| | TAGTCCGTTATCAACTTGAAAAAGTGGC | 1860) 3′ terminal sequence |
| | ACCGAGTCGGTGCGTACGCAGCCCCTTC | |
| | GAGTACCCACAGTTTTT (SEQ ID NO: | |
| | 727) | |
| 728 | AGTACTGTGGGTACTCGAAGGTTTTAGA | pegRNA; contains gRNA core SEQ ID |
| | GCTAGAAATAGCAAGTTAAAATAAGGC | NO: 1854, and TTTT (sequence number |
| | TAGTCCGTTATCAACTTGAAAAAGTGGC | 1860) 3′ terminal sequence |
| | ACCGAGTCGGTGCTGGTACGCAGCCCC | |
| | TTCGAGTACCCACAGTTTTT (SEQ ID NO: | |
| | 728) | |
| 496 | CTTCTCCAATGCGACGGGTGGTTTTAGA | PE3 ngRNA (TGG PAM); contains |
| | GCTAGAAATAGCAAGTTAAAATAAGGC | gRNA core SEQ ID NO: 1854 |
| | TAGTCCGTTATCAACTTGAAAAAGTGGC | |
| | ACCGAGTCGGTGC (SEQ ID NO: 496) | |
| 497 | GTGCCCTTCTCCAATGCGACGTTTTAGA | PE3 ngRNA (GGG PAM); contains |
| | GCTAGAAATAGCAAGTTAAAATAAGGC | gRNA core SEQ ID NO: 1854 |
| | TAGTCCGTTATCAACTTGAAAAAGTGGC | |
| | ACCGAGTCGGTGC (SEQ ID NO: 497) | |
| 498 | CGTGCCCTTCTCCAATGCGAGTTTTAGA | PE3 ngRNA (CGG PAM); contains |
| | GCTAGAAATAGCAAGTTAAAATAAGGC | gRNA core SEQ ID NO: 1854 |
| | TAGTCCGTTATCAACTTGAAAAAGTGGC | |
| | ACCGAGTCGGTGC (SEQ ID NO: 498) | |
| 499 | ACAGCCATGAATGGCACAGAGTTTTAG | PE3 ngRNA (AGG PAM); contains |
| | AGCTAGAAATAGCAAGTTAAAATAAGG | gRNA core SEQ ID NO: 1854 |
| | CTAGTCCGTTATCAACTTGAAAAAGTGG | |
| | CACCGAGTCGGTGC (SEQ ID NO: 499) | |
| 500 | ACAAGGGCCACAGCCATGAAGTTTTAG | PE3 ngRNA (TGG PAM); contains |
| | AGCTAGAAATAGCAAGTTAAAATAAGG | gRNA core SEQ ID NO: 1854 |
| | CTAGTCCGTTATCAACTTGAAAAAGTGG | |
| | CACCGAGTCGGTGC (SEQ ID NO: 500) | |
| 501 | CAGCCACGGGTCAGCCACAAGTTTTAG | PE3 ngRNA (GGG PAM); contains |
| | AGCTAGAAATAGCAAGTTAAAATAAGG | gRNA core SEQ ID NO: 1854 |
| | CTAGTCCGTTATCAACTTGAAAAAGTGG | |
| | CACCGAGTCGGTGC (SEQ ID NO: 501) | |
| 502 | GCGTGCCCTTCTCCAATGCGAGTTTTAG | PE3 ngRNA (CGG PAM); contains |
| | AGCTAGAAATAGCAAGTTAAAATAAGG | gRNA core SEQ ID NO: 1854 |
| | CTAGTCCGTTATCAACTTGAAAAAGTGG | |
| | CACCGAGTCGGTGC (SEQ ID NO: 502) | |
| 503 | GACAGCCATGAATGGCACAGAGTTTTA | PE3 ngRNA (AGG PAM); contains |
| | GAGCTAGAAATAGCAAGTTAAAATAAG | gRNA core SEQ ID NO: 1854 |
| | GCTAGTCCGTTATCAACTTGAAAAAGTG | |
| | GCACCGAGTCGGTGC (SEQ ID NO: 503) | |
| 507 | CTTCTCCAATGCGACGGGTGGTTTTAGA | PE3 ngRNA (TGG PAM); contains |
| | GCTAGAAATAGCAAGTTAAAATAAGGC | gRNA core SEQ ID NO: 1854, and |
| | TAGTCCGTTATCAACTTGAAAAAGTGGC | Linker [AACATTGA (Sequence |
| | ACCGAGTCGGTGCAACATTGACGCGTC | Number: 1728)] + Univ. 3′ Motif |
| | TCTACGTGGGGGCGCG (SEQ ID NO: 507) | [CGCGTCTCTACGTGGGGGCGCG |
| | | (Sequence Number: 1850)] |
| 508 | GTGCCCTTCTCCAATGCGACGTTTTAGA | PE3 ngRNA (GGG PAM); contains |
| | GCTAGAAATAGCAAGTTAAAATAAGGC | gRNA core SEQ ID NO: 1854, and |
| | TAGTCCGTTATCAACTTGAAAAAGTGGC | Linker [AACATTGA (Sequence |
| | ACCGAGTCGGTGCAACATTGACGCGTC | Number: 1728)] + Univ. 3′ Motif |
| | TCTACGTGGGGGCGCG (SEQ ID NO: 508) | [CGCGTCTCTACGTGGGGGCGCG |
| | | (Sequence Number: 1850)] |
| 509 | CGTGCCCTTCTCCAATGCGAGTTTTAGA | PE3 ngRNA (CGG PAM); contains |
| | GCTAGAAATAGCAAGTTAAAATAAGGC | gRNA core SEQ ID NO: 1854, and |
| | TAGTCCGTTATCAACTTGAAAAAGTGGC | Linker [AACATTGA (Sequence |
| | ACCGAGTCGGTGCAACATTGACGCGTC | Number: 1728)] + Univ. 3′ Motif |
| | TCTACGTGGGGGCGCG (SEQ ID NO: 509) | [CGCGTCTCTACGTGGGGGCGCG |
| | | (Sequence Number: 1850)] |
| 510 | ACAGCCATGAATGGCACAGAGTTTTAG | PE3 ngRNA (AGG PAM); contains |
| | AGCTAGAAATAGCAAGTTAAAATAAGG | gRNA core SEQ ID NO: 1854, and |
| | CTAGTCCGTTATCAACTTGAAAAAGTGG | Linker [AACATTGA (Sequence |
| | CACCGAGTCGGTGCAACATTGACGCGT | Number: 1728)] + Univ. 3′ Motif |
| | CTCTACGTGGGGGCGCG (SEQ ID NO: | [CGCGTCTCTACGTGGGGGCGCG |
| | 510) | (Sequence Number: 1850)] |
| 511 | ACAAGGGCCACAGCCATGAAGTTTTAG | PE3 ngRNA (TGG PAM); contains |
| | AGCTAGAAATAGCAAGTTAAAATAAGG | gRNA core SEQ ID NO: 1854, and |
| | CTAGTCCGTTATCAACTTGAAAAAGTGG | Linker [AACATTGA (Sequence |
| | CACCGAGTCGGTGCAACATTGACGCGT | Number: 1728)] + Univ. 3′ Motif |
| | CTCTACGTGGGGGCGCG (SEQ ID NO: | [CGCGTCTCTACGTGGGGGCGCG |
| | 511) | (Sequence Number: 1850)] |
| 512 | CAGCCACGGGTCAGCCACAAGTTTTAG | PE3 ngRNA (GGG PAM); contains |
| | AGCTAGAAATAGCAAGTTAAAATAAGG | gRNA core SEQ ID NO: 1854, and |
| | CTAGTCCGTTATCAACTTGAAAAAGTGG | Linker [AACATTGA (Sequence |
| | CACCGAGTCGGTGCAACATTGACGCGT | Number: 1728)] + Univ. 3′ Motif |
| | CTCTACGTGGGGGCGCG (SEQ ID NO: | [CGCGTCTCTACGTGGGGGCGCG |
| | 512) | (Sequence Number: 1850)] |
| 513 | GTGCCCTTCTCCAATGCGACGTTTTAGA | PE3 ngRNA (GGG PAM); contains |
| | GCTAGAAATAGCAAGTTAAAATAAGGC | gRNA core SEQ ID NO: 1854, Linker |
| | TAGTCCGTTATCAACTTGAAAAAGTGGC | [AACATTGA (Sequence Number: |
| | ACCGAGTCGGTGCAACATTGACGCGTC | 1728)] + Univ. 3′ Motif |
| | TCTACGTGGGGGCGCGTTTTTTT (SEQ ID | [CGCGTCTCTACGTGGGGGCGCG |
| | NO: 513) | (Sequence Number: 1850)], and |
| | | transcription adaptations |
| 514 | GCGTGCCCTTCTCCAATGCGAGTTTTAG | PE3 ngRNA (CGG PAM); contains |
| | AGCTAGAAATAGCAAGTTAAAATAAGG | gRNA core SEQ ID NO: 1854, Linker |
| | CTAGTCCGTTATCAACTTGAAAAAGTGG | [AACATTGA (Sequence Number: |
| | CACCGAGTCGGTGCAACATTGACGCGT | 1728)] + Univ. 3′ Motif |
| | CTCTACGTGGGGGCGCGTTTTTTT (SEQ | [CGCGTCTCTACGTGGGGGCGCG |
| | ID NO: 514) | (Sequence Number: 1850)], and |
| | | transcription adaptations |
| 514 | GCGTGCCCTTCTCCAATGCGAGTTTTAG | PE3 ngRNA (CGG PAM); contains |
| | AGCTAGAAATAGCAAGTTAAAATAAGG | gRNA core SEQ ID NO: 1854, Linker |
| | CTAGTCCGTTATCAACTTGAAAAAGTGG | [AACATTGA (Sequence Number: |
| | CACCGAGTCGGTGCAACATTGACGCGT | 1728)] + Univ. 3′ Motif |
| | CTCTACGTGGGGGCGCGTTTTTTT (SEQ | [CGCGTCTCTACGTGGGGGCGCG |
| | ID NO: 514) | (Sequence Number: 1850)], and |
| | | transcription adaptations |
| 515 | GACAGCCATGAATGGCACAGAGTTTTA | PE3 ngRNA (AGG PAM); contains |
| | GAGCTAGAAATAGCAAGTTAAAATAAG | gRNA core SEQ ID NO: 1854, Linker |
| | GCTAGTCCGTTATCAACTTGAAAAAGTG | [AACATTGA (Sequence Number: |
| | GCACCGAGTCGGTGCAACATTGACGCG | 1728)] + Univ. 3′ Motif |
| | TCTCTACGTGGGGGCGCGTTTTTTT (SEQ | [CGCGTCTCTACGTGGGGGCGCG |
| | ID NO: 515) | (Sequence Number: 1850)], and |
| | | transcription adaptations |

TABLE 3

| Sequence | | |
|---|---|---|
| Number | Sequence | Description |
| 729 | CTCCAATGCGACGGGTG (SEQ ID NO: | PEgRNA spacer (TGG PAM) |
| | 729) | |
| 730 | TCTCCAATGCGACGGGTG (SEQ ID NO: | PEgRNA spacer (TGG PAM) |
| | 730) | |
| 731 | TTCTCCAATGCGACGGGTG (SEQ ID NO: | PEgRNA spacer (TGG PAM) |
| | 731) | |
| 76 | CTTCTCCAATGCGACGGGTG (SEQ ID | PEgRNA spacer (TGG PAM) |
| | NO: 76) | |
| 732 | CCTTCTCCAATGCGACGGGTG (SEQ ID | PERNA spacer (TGG PAM) |
| | NO: 732) | |
| 733 | CCCTTCTCCAATGCGACGGGTG (SEQ ID | PEgRNA spacer (TGG PAM) |
| | NO: 733) | |
| 734 | CCGTC | PBS |
| 735 | CCGTCG | PBS |
| 736 | CCGTCGC | PBS |
| 737 | CCGTCGCA | PBS |
| 738 | CCGTCGCAT | PBS |
| 739 | CCGTCGCATT (SEQ ID NO: 739) | PBS |
| 740 | CCGTCGCATTG (SEQ ID NO: 740) | PBS |
| 741 | CCGTCGCATTGG (SEQ ID NO: 741) | PBS |
| 742 | CCGTCGCATTGGA (SEQ ID NO: 742) | PBS |
| 743 | CCGTCGCATTGGAG (SEQ ID NO: 743) | PBS |
| 744 | CCGTCGCATTGGAGA (SEQ ID NO: 744) | PBS |
| 745 | CCGTCGCATTGGAGAA (SEQ ID NO: 745) | PBS |
| 746 | CCGTCGCATTGGAGAAG (SEQ ID NO: | PBS |
| | 746) | |
| 747 | CCGTCGCATTGGAGAAGG (SEQ ID NO: | PBS |
| | 747) | |
| 748 | CCGTCGCATTGGAGAAGGG (SEQ ID NO: | PBS |
| | 748) | |
| 749 | GGGCTGCGTACAACAC (SEQ ID NO: 749) | RTT*2 (TGG-to-TTG PAM silencing |
| | | edit) |
| 750 | GGGCTGCGTACCACAC (SEQ ID NO: 750) | RTT |
| 751 | GGGCTGCGTACGACAC (SEQ ID NO: 751) | RTT*3 (TGG-to-TCG PAM silencing |
| | | edit) |
| 752 | GGGCTGCGTACTACAC (SEQ ID NO: 752) | RTT*1 (TGG-to-TAG PAM silencing |
| | | edit) |
| 753 | GGGGCTGCGTACAACAC (SEQ ID NO: | RTT*2 (TGG-to-TTG PAM silencing |
| | 753) | edit) |
| 754 | GGGGCTGCGTACCACAC (SEQ ID NO: | RTT |
| | 754) | |
| 755 | GGGGCTGCGTACGACAC (SEQ ID NO: | RTT*3 (TGG-to-TCG PAM silencing |
| | 755) | edit) |
| 756 | GGGGCTGCGTACTACAC (SEQ ID NO: | RTT*1 (TGG-to-TAG PAM silencing |
| | 756) | edit) |
| 757 | AGGGGCTGCGTACAACAC (SEQ ID NO: | RTT*2 (TGG-to-TTG PAM silencing |
| | 757) | edit) |
| 758 | AGGGGCTGCGTACCACAC (SEQ ID NO: | RTT |
| | 758) | |
| 759 | AGGGGCTGCGTACGACAC (SEQ ID NO: | RTT*3 (TGG-to-TCG PAM silencing |
| | 759) | edit) |
| 760 | AGGGGCTGCGTACTACAC (SEQ ID NO: | RTT*1 (TGG-to-TAG PAM silencing |
| | 760) | edit) |
| 761 | AAGGGGCTGCGTACAACAC (SEQ ID NO: | RTT*2 (TGG-to-TTG PAM silencing |
| | 761) | edit) |
| 762 | AAGGGGCTGCGTACCACAC (SEQ ID NO: | RTT |
| | 762) | |
| 763 | AAGGGGCTGCGTACGACAC (SEQ ID NO: | RTT*3 (TGG-to-TCG PAM silencing |
| | 763) | edit) |
| 764 | AAGGGGCTGCGTACTACAC (SEQ ID NO: | RTT*1 (TGG-to-TAG PAM silencing |
| | 764) | edit) |
| 765 | GAAGGGGCTGCGTACAACAC (SEQ ID | RTT*2 (TGG-to-TTG PAM silencing |
| | NO: 765) | edit) |
| 766 | GAAGGGGCTGCGTACCACAC (SEQ ID | RTT |
| | NO: 766) | |
| 767 | GAAGGGGCTGCGTACGACAC (SEQ ID | RTT*3 (TGG-to-TCG PAM silencing |
| | NO: 767) | edit) |
| 768 | GAAGGGGCTGCGTACTACAC (SEQ ID | RTT*1 (TGG-to-TAG PAM silencing |
| | NO: 768) | edit) |
| 769 | CGAAGGGGCTGCGTACAACAC (SEQ ID | RTT*2 (TGG-to-TTG PAM silencing |
| | NO: 769) | edit) |
| 770 | CGAAGGGGCTGCGTACCACAC (SEQ ID | RTT |
| | NO: 770) | |
| 771 | CGAAGGGGCTGCGTACGACAC (SEQ ID | RTT*3 (TGG-to-TCG PAM silencing |
| | NO: 771) | edit) |
| 772 | CGAAGGGGCTGCGTACTACAC (SEQ ID | RTT*1 (TGG-to-TAG PAM silencing |
| | NO: 772) | edit) |
| 773 | TCGAAGGGGCTGCGTACAACAC (SEQ ID | RTT*2 (TGG-to-TTG PAM silencing |
| | NO: 773) | edit) |
| 774 | TCGAAGGGGCTGCGTACCACAC (SEQ ID | RTT |
| | NO: 774) | |
| 775 | TCGAAGGGGCTGCGTACGACAC (SEQ ID | RTT*3 (TGG-to-TCG PAM silencing |
| | NO: 775) | edit) |
| 776 | TCGAAGGGGCTGCGTACTACAC (SEQ ID | RTT*1 (TGG-to-TAG PAM silencing |
| | NO: 776) | edit) |
| 777 | CTCGAAGGGGCTGCGTACAACAC (SEQ | RTT*2 (TGG-to-TTG PAM silencing |
| | ID NO: 777) | edit) |
| 778 | CTCGAAGGGGCTGCGTACCACAC (SEQ | RTT |
| | ID NO: 778) | |
| 779 | CTCGAAGGGGCTGCGTACGACAC (SEQ | RTT*3 (TGG-to-TCG PAM silencing |
| | ID NO: 779) | edit) |
| 780 | CTCGAAGGGGCTGCGTACTACAC (SEQ | RTT*1 (TGG-to-TAG PAM silencing |
| | ID NO: 780) | edit) |
| 781 | ACTCGAAGGGGCTGCGTACAACAC | RTT*2 (TGG-to-TTG PAM silencing |
| | (SEQ ID NO: 781) | edit) |
| 782 | ACTCGAAGGGGCTGCGTACCACAC (SEQ | RTT |
| | ID NO: 782) | |
| 783 | ACTCGAAGGGGCTGCGTACGACAC | RTT*3 (TGG-to-TCG PAM silencing |
| | (SEQ ID NO: 783) | edit) |
| 784 | ACTCGAAGGGGCTGCGTACTACAC (SEQ | RTT*1 (TGG-to-TAG PAM silencing |
| | ID NO: 784) | edit) |
| 785 | TACTCGAAGGGGCTGCGTACAACAC | RTT*2 (TGG-to-TTG PAM silencing |
| | (SEQ ID NO: 785) | edit) |
| 786 | TACTCGAAGGGGCTGCGTACCACAC | RTT |
| | (SEQ ID NO: 786) | |
| 787 | TACTCGAAGGGGCTGCGTACGACAC | RTT*3 (TGG-to-TCG PAM silencing |
| | (SEQ ID NO: 787) | edit) |
| 788 | TACTCGAAGGGGCTGCGTACTACAC | RTT*1 (TGG-to-TAG PAM silencing |
| | (SEQ ID NO: 788) | edit) |
| 789 | GTACTCGAAGGGGCTGCGTACAACAC | RTT*2 (TGG-to-TTG PAM silencing |
| | (SEQ ID NO: 789) | edit) |
| 790 | GTACTCGAAGGGGCTGCGTACCACAC | RTT |
| | (SEQ ID NO: 790) | |
| 791 | GTACTCGAAGGGGCTGCGTACGACAC | RTT*3 (TGG-to-TCG PAM silencing |
| | (SEQ ID NO: 791) | edit) |
| 792 | GTACTCGAAGGGGCTGCGTACTACAC | RTT*1 (TGG-to-TAG PAM silencing |
| | (SEQ ID NO: 792) | edit) |
| 793 | GGTACTCGAAGGGGCTGCGTACAACAC | RTT*2 (TGG-to-TTG PAM silencing |
| | (SEQ ID NO: 793) | edit) |
| 794 | GGTACTCGAAGGGGCTGCGTACCACAC | RTT |
| | (SEQ ID NO: 794) | |
| 795 | GGTACTCGAAGGGGCTGCGTACGACAC | RTT*3 (TGG-to-TCG PAM silencing |
| | (SEQ ID NO: 795) | edit) |
| 796 | GGTACTCGAAGGGGCTGCGTACTACAC | RTT*1 (TGG-to-TAG PAM silencing |
| | (SEQ ID NO: 796) | edit) |
| 797 | GGGTACTCGAAGGGGCTGCGTACAACA | RTT*2 (TGG-to-TTG PAM silencing |
| | C (SEQ ID NO: 797) | edit) |
| 798 | GGGTACTCGAAGGGGCTGCGTACCACA | RTT |
| | C (SEQ ID NO: 798) | |
| 799 | GGGTACTCGAAGGGGCTGCGTACGACA | RTT*3 (TGG-to-TCG PAM silencing |
| | C (SEQ ID NO: 799) | edit) |
| 800 | GGGTACTCGAAGGGGCTGCGTACTACA | RTT*1 (TGG-to-TAG PAM silencing |
| | C (SEQ ID NO: 800) | edit) |
| 801 | TGGGTACTCGAAGGGGCTGCGTACAAC | RTT*2 (TGG-to-TTG PAM silencing |
| | AC (SEQ ID NO: 801) | edit) |
| 802 | TGGGTACTCGAAGGGGCTGCGTACCAC | RTT |
| | AC (SEQ ID NO: 802) | |
| 803 | TGGGTACTCGAAGGGGCTGCGTACGAC | RTT*3 (TGG-to-TCG PAM silencing |
| | AC (SEQ ID NO: 803) | edit) |
| 804 | TGGGTACTCGAAGGGGCTGCGTACTAC | RTT*1 (TGG-to-TAG PAM silencing |
| | AC (SEQ ID NO: 804) | edit) |
| 805 | GTGGGTACTCGAAGGGGCTGCGTACAA | RTT*2 (TGG-to-TTG PAM silencing |
| | CAC (SEQ ID NO: 805) | edit) |
| 806 | GTGGGTACTCGAAGGGGCTGCGTACCA | RTT |
| | CAC (SEQ ID NO: 806) | |
| 807 | GTGGGTACTCGAAGGGGCTGCGTACGA | RTT*3 (TGG-to-TCG PAM silencing |
| | CAC (SEQ ID NO: 807) | edit) |
| 808 | GTGGGTACTCGAAGGGGCTGCGTACTA | RTT*1 (TGG-to-TAG PAM silencing |
| | CAC (SEQ ID NO: 808) | edit) |
| 809 | TGTGGGTACTCGAAGGGGCTGCGTACA | RTT*2 (TGG-to-TTG PAM silencing |
| | ACAC (SEQ ID NO: 809) | edit) |
| 810 | TGTGGGTACTCGAAGGGGCTGCGTACC | RTT |
| | ACAC (SEQ ID NO: 810) | |
| 811 | TGTGGGTACTCGAAGGGGCTGCGTACG | RTT*3 (TGG-to-TCG PAM silencing |
| | ACAC (SEQ ID NO: 811) | edit) |
| 812 | TGTGGGTACTCGAAGGGGCTGCGTACT | RTT*1 (TGG-to-TAG PAM silencing |
| | ACAC (SEQ ID NO: 812) | edit) |
| 813 | CTGTGGGTACTCGAAGGGGCTGCGTAC | RTT*2 (TGG-to-TTG PAM silencing |
| | AACAC (SEQ ID NO: 813) | edit) |
| 814 | CTGTGGGTACTCGAAGGGGCTGCGTAC | RTT |
| | CACAC (SEQ ID NO: 814) | |
| 815 | CTGTGGGTACTCGAAGGGGCTGCGTAC | RTT*3 (TGG-to-TCG PAM silencing |
| | GACAC (SEQ ID NO: 815) | edit) |
| 816 | CTGTGGGTACTCGAAGGGGCTGCGTAC | RTT*1 (TGG-to-TAG PAM silencing |
| | TACAC (SEQ ID NO: 816) | edit) |
| 817 | ACTGTGGGTACTCGAAGGGGCTGCGTA | RTT*2 (TGG-to-TTG PAM silencing |
| | CAACAC (SEQ ID NO: 817) | edit) |
| 818 | ACTGTGGGTACTCGAAGGGGCTGCGTA | RTT |
| | CCACAC (SEQ ID NO: 818) | |
| 819 | ACTGTGGGTACTCGAAGGGGCTGCGTA | RTT*3 (TGG-to-TCG PAM silencing |
| | CGACAC (SEQ ID NO: 819) | edit) |
| 820 | ACTGTGGGTACTCGAAGGGGCTGCGTA | RTT*1 (TGG-to-TAG PAM silencing |
| | CTACAC (SEQ ID NO: 820) | edit) |
| 821 | TACTGTGGGTACTCGAAGGGGCTGCGT | RTT*2 (TGG-to-TTG PAM silencing |
| | ACAACAC (SEQ ID NO: 821) | edit) |
| 822 | TACTGTGGGTACTCGAAGGGGCTGCGT | RTT |
| | ACCACAC (SEQ ID NO: 822) | |
| 823 | TACTGTGGGTACTCGAAGGGGCTGCGT | RTT*3 (TGG-to-TCG PAM silencing |
| | ACGACAC (SEQ ID NO: 823) | edit) |
| 824 | TACTGTGGGTACTCGAAGGGGCTGCGT | RTT*1 (TGG-to-TAG PAM silencing |
| | ACTACAC (SEQ ID NO: 824) | edit) |
| 825 | GTACTGTGGGTACTCGAAGGGGCTGCG | RTT*2 (TGG-to-TTG PAM silencing |
| | TACAACAC (SEQ ID NO: 825) | edit) |
| 826 | GTACTGTGGGTACTCGAAGGGGCTGCG | RTT |
| | TACCACAC (SEQ ID NO: 826) | |
| 827 | GTACTGTGGGTACTCGAAGGGGCTGCG | RTT*3 (TGG-to-TCG PAM silencing |
| | TACGACAC (SEQ ID NO: 827) | edit) |
| 828 | GTACTGTGGGTACTCGAAGGGGCTGCG | RTT*1 (TGG-to-TAG PAM silencing |
| | TACTACAC (SEQ ID NO: 828) | edit) |
| 829 | AGTACTGTGGGTACTCGAAGGGGCTGC | RTT*2 (TGG-to-TTG PAM silencing |
| | GTACAACAC (SEQ ID NO: 829) | edit) |
| 830 | AGTACTGTGGGTACTCGAAGGGGCTGC | RTT |
| | GTACCACAC (SEQ ID NO: 830) | |
| 831 | AGTACTGTGGGTACTCGAAGGGGCTGC | RTT*3 (TGG-to-TCG PAM silencing |
| | GTACGACAC (SEQ ID NO: 831) | edit) |
| 832 | AGTACTGTGGGTACTCGAAGGGGCTGC | RTT*1 (TGG-to-TAG PAM silencing |
| | GTACTACAC (SEQ ID NO: 832) | edit) |
| 833 | TAGTACTGTGGGTACTCGAAGGGGCTG | RTT*2 (TGG-to-TTG PAM silencing |
| | CGTACAACAC (SEQ ID NO: 833) | edit) |
| 834 | TAGTACTGTGGGTACTCGAAGGGGCTG | RTT |
| | CGTACCACAC (SEQ ID NO: 834) | |
| 835 | TAGTACTGTGGGTACTCGAAGGGGCTG | RTT*3 (TGG-to-TCG PAM silencing |
| | CGTACGACAC (SEQ ID NO: 835) | edit) |
| 836 | TAGTACTGTGGGTACTCGAAGGGGCTG | RTT*1 (TGG-to-TAG PAM silencing |
| | CGTACTACAC (SEQ ID NO: 836) | edit) |
| 837 | GTAGTACTGTGGGTACTCGAAGGGGCT | RTT*2 (TGG-to-TTG PAM silencing |
| | GCGTACAACAC (SEQ ID NO: 837) | edit) |
| 838 | GTAGTACTGTGGGTACTCGAAGGGGCT | RTT |
| | GCGTACCACAC (SEQ ID NO: 838) | |
| 839 | GTAGTACTGTGGGTACTCGAAGGGGCT | RTT*3 (TGG-to-TCG PAM silencing |
| | GCGTACGACAC (SEQ ID NO: 839) | edit) |
| 840 | GTAGTACTGTGGGTACTCGAAGGGGCT | RTT*1 (TGG-to-TAG PAM silencing |
| | GCGTACTACAC (SEQ ID NO: 840) | edit) |
| 841 | GGTAGTACTGTGGGTACTCGAAGGGGC | RTT*2 (TGG-to-TTG PAM silencing |
| | TGCGTACAACAC (SEQ ID NO: 841) | edit) |
| 842 | GGTAGTACTGTGGGTACTCGAAGGGGC | RTT |
| | TGCGTACCACAC (SEQ ID NO: 842) | |
| 843 | GGTAGTACTGTGGGTACTCGAAGGGGC | RTT*3 (TGG-to-TCG PAM silencing |
| | TGCGTACGACAC (SEQ ID NO: 843) | edit) |
| 844 | GGTAGTACTGTGGGTACTCGAAGGGGC | RTT*1 (TGG-to-TAG PAM silencing |
| | TGCGTACTACAC (SEQ ID NO: 844) | edit) |
| 845 | AGGTAGTACTGTGGGTACTCGAAGGGG | RTT*2 (TGG-to-TTG PAM silencing |
| | CTGCGTACAACAC (SEQ ID NO: 845) | edit) |
| 846 | AGGTAGTACTGTGGGTACTCGAAGGGG | RTT |
| | CTGCGTACCACAC (SEQ ID NO: 846) | |
| 847 | AGGTAGTACTGTGGGTACTCGAAGGGG | RTT*3 (TGG-to-TCG PAM silencing |
| | CTGCGTACGACAC (SEQ ID NO: 847) | edit) |
| 848 | AGGTAGTACTGTGGGTACTCGAAGGGG | RTT*1 (TGG-to-TAG PAM silencing |
| | CTGCGTACTACAC (SEQ ID NO: 848) | edit) |
| 849 | AAACATGTAGGCGGCCAGCA (SEQ ID | PE3 ngRNA spacer (TGG PAM) |
| | NO: 849) | |
| 850 | AGAACTGCCATGGCTCAGCC (SEQ ID | PE3 ngRNA spacer (AGG PAM) |
| | NO: 850) | |
| 851 | AGAGCGTGAGGAAGTTGATG (SEQ ID | PE3 ngRNA spacer (GGG PAM) |
| | NO: 851) | |
| 520 | AGTACTGTGGGTACTCGAAG (SEQ ID | PE3 ngRNA spacer (TGG PAM) |
| | NO: 520) | |
| 852 | CACGATCAGCAGAAACATGT (SEQ ID | PE3 ngRNA spacer (AGG PAM) |
| | NO: 852) | |
| 853 | GATCAGCAGAAACATGTAGG (SEQ ID | PE3 ngRNA spacer (CGG PAM) |
| | NO: 853) | |
| 854 | GCCAGCATGGAGAACTGCCA (SEQ ID | PE3 ngRNA spacer (TGG PAM) |
| | NO: 854) | |
| 4 | GCTCAGCCAGGTAGTACTGT (SEQ ID | PE3 ngRNA spacer (GGG PAM) |
| | NO: 4) | |
| 855 | GGCTCAGCCAGGTAGTACTG (SEQ ID | PE3 ngRNA spacer (TGG PAM) |
| | NO: 855) | |
| 856 | GTAGAGCGTGAGGAAGTTGA (SEQ ID | PE3 ngRNA spacer (TGG PAM) |
| | NO: 856) | |
| 857 | TAGAGCGTGAGGAAGTTGAT (SEQ ID | PE3 ngRNA spacer (GGG PAM) |
| | NO: 857) | |
| 858 | GGACGGTGACGTAGAGCGTG (SEQ ID | PE3 ngRNA spacer (AGG PAM) |
| | NO: 858) | |
| 859 | GCGTACTACACCCGTCGCAT (SEQ ID | PE3b* 1 ngRNA spacer (TGG PAM) |
| | NO: 859) | |
| 860 | GCGTACAACACCCGTCGCAT (SEQ ID | PE3b*2 ngRNA spacer (TGG PAM) |
| | NO: 860) | |
| 861 | GCGTACGACACCCGTCGCAT (SEQ ID | PE3b*3 ngRNA spacer (TGG PAM) |
| | NO: 861) | |
| 862 | GCGTACCACACCCGTCGCAT (SEQ ID | PE3 ngRNA spacer (TGG PAM) |
| | NO: 862) | |
| 863 | CTTCTCCAATGCGACGGGTGGTTTTAGA | pegRNA; contains gRNA core SEQ ID |
| | GCTAGAAATAGCAAGTTAAAATAAGGC | NO: 1854 |
| | TAGTCCGTTATCAACTTGAAAAAGTGGC | |
| | ACCGAGTCGGTGCGAAGGGGCTGCGTA | |
| | CCACACCCGTCGCA (SEQ ID NO: 863) | |
| 864 | CTTCTCCAATGCGACGGGTGGTTTTAGA | pegRNA*3 (TGG-to-TCG PAM |
| | GCTAGAAATAGCAAGTTAAAATAAGGC | silencing edit); contains gRNA core |
| | TAGTCCGTTATCAACTTGAAAAAGTGGC | SEQ ID NO: 1854 |
| | ACCGAGTCGGTGCGAAGGGGCTGCGTA | |
| | CGACACCCGTCGCA (SEQ ID NO: 864) | |
| 865 | CTTCTCCAATGCGACGGGTGGTTTTAGA | pegRNA*1 (TGG-to-TAG PAM |
| | GCTAGAAATAGCAAGTTAAAATAAGGC | silencing edit); contains gRNA core |
| | TAGTCCGTTATCAACTTGAAAAAGTGGC | SEQ ID NO: 1854 |
| | ACCGAGTCGGTGCGAAGGGGCTGCGTA | |
| | CTACACCCGTCGCA (SEQ ID NO: 865) | |
| 866 | CTTCTCCAATGCGACGGGTGGTTTTAGA | pegRNA*2 (TGG-to-TTG PAM |
| | GCTAGAAATAGCAAGTTAAAATAAGGC | silencing edit); contains gRNA core |
| | TAGTCCGTTATCAACTTGAAAAAGTGGC | SEQ ID NO: 1854 |
| | ACCGAGTCGGTGCGAAGGGGCTGCGTA | |
| | CAACACCCGTCGCA (SEQ ID NO: 866) | |
| 867 | CTTCTCCAATGCGACGGGTGGTTTTAGA | pegRNA*3 (TGG-to-TCG PAM |
| | GCTAGAAATAGCAAGTTAAAATAAGGC | silencing edit); contains gRNA core |
| | TAGTCCGTTATCAACTTGAAAAAGTGGC | SEQ ID NO: 1854 |
| | ACCGAGTCGGTGCGAAGGGGCTGCGTA | |
| | CGACACCCGTCGCAT (SEQ ID NO: 867) | |
| 868 | CTTCTCCAATGCGACGGGTGGTTTTAGA | pegRNA*3 (TGG-to-TCG PAM |
| | GCTAGAAATAGCAAGTTAAAATAAGGC | silencing edit); contains gRNA core |
| | TAGTCCGTTATCAACTTGAAAAAGTGGC | SEQ ID NO: 1854 |
| | ACCGAGTCGGTGCTCGAAGGGGCTGCG | |
| | TACGACACCCGTCGC (SEQ ID NO: 868) | |
| 869 | CTTCTCCAATGCGACGGGTGGTTTTAGA | pegRNA*1 (TGG-to-TAG PAM |
| | GCTAGAAATAGCAAGTTAAAATAAGGC | silencing edit); contains gRNA core |
| | TAGTCCGTTATCAACTTGAAAAAGTGGC | SEQ ID NO: 1854 |
| | ACCGAGTCGGTGCGAAGGGGCTGCGTA | |
| | CTACACCCGTCGCAT (SEQ ID NO: 869) | |
| 870 | CTTCTCCAATGCGACGGGTGGTTTTAGA | pegRNA*1 (TGG-to-TAG PAM |
| | GCTAGAAATAGCAAGTTAAAATAAGGC | silencing edit); contains gRNA core |
| | TAGTCCGTTATCAACTTGAAAAAGTGGC | SEQ ID NO: 1854 |
| | ACCGAGTCGGTGCTCGAAGGGGCTGCG | |
| | TACTACACCCGTCGC (SEQ ID NO: 870) | |
| 871 | CTTCTCCAATGCGACGGGTGGTTTTAGA | pegRNA; contains gRNA core SEQ ID |
| | GCTAGAAATAGCAAGTTAAAATAAGGC | NO: 1854 |
| | TAGTCCGTTATCAACTTGAAAAAGTGGC | |
| | ACCGAGTCGGTGCGAAGGGGCTGCGTA | |
| | CCACACCCGTCGCAT (SEQ ID NO: 871) | |
| 872 | CTTCTCCAATGCGACGGGTGGTTTTAGA | pegRNA; contains gRNA core SEQ ID |
| | GCTAGAAATAGCAAGTTAAAATAAGGC | NO: 1854 |
| | TAGTCCGTTATCAACTTGAAAAAGTGGC | |
| | ACCGAGTCGGTGCTCGAAGGGGCTGCG | |
| | TACCACACCCGTCGC (SEQ ID NO: 872) | |
| 873 | CTTCTCCAATGCGACGGGTGGTTTTAGA | pegRNA*2 (TGG-to-TTG PAM |
| | GCTAGAAATAGCAAGTTAAAATAAGGC | silencing edit); contains gRNA core |
| | TAGTCCGTTATCAACTTGAAAAAGTGGC | SEQ ID NO: 1854 |
| | ACCGAGTCGGTGCGAAGGGGCTGCGTA | |
| | CAACACCCGTCGCAT (SEQ ID NO: 873) | |
| 874 | CTTCTCCAATGCGACGGGTGGTTTTAGA | pegRNA*2 (TGG-to-TTG PAM |
| | GCTAGAAATAGCAAGTTAAAATAAGGC | silencing edit); contains gRNA core |
| | TAGTCCGTTATCAACTTGAAAAAGTGGC | SEQ ID NO: 1854 |
| | ACCGAGTCGGTGCTCGAAGGGGCTGCG | |
| | TACAACACCCGTCGC (SEQ ID NO: 874) | |
| 875 | GCTTCTCCAATGCGACGGGTGGTTTTAG | pegRNA*1 (TGG-to-TAG PAM |
| | AGCTAGAAATAGCAAGTTAAAATAAGG | silencing edit); contains gRNA core |
| | CTAGTCCGTTATCAACTTGAAAAAGTGG | SEQ ID NO: 1854 |
| | CACCGAGTCGGTGCGAAGGGGCTGCGT | |
| | ACTACACCCGTCGCA (SEQ ID NO: 875) | |
| 876 | CTTCTCCAATGCGACGGGTGGTTTTAGA | pegRNA; contains gRNA core SEQ ID |
| | GCTAGAAATAGCAAGTTAAAATAAGGC | NO: 1854 |
| | TAGTCCGTTATCAACTTGAAAAAGTGGC | |
| | ACCGAGTCGGTGCGAAGGGGCTGCGTA | |
| | CCACACCCGTCGCATT (SEQ ID NO: 876) | |
| 877 | CTTCTCCAATGCGACGGGTGGTTTTAGA | pegRNA; contains gRNA core SEQ ID |
| | GCTAGAAATAGCAAGTTAAAATAAGGC | NO: 1854 |
| | TAGTCCGTTATCAACTTGAAAAAGTGGC | |
| | ACCGAGTCGGTGCTCGAAGGGGCTGCG | |
| | TACCACACCCGTCGCA (SEQ ID NO: 877) | |
| 878 | CTTCTCCAATGCGACGGGTGGTTTTAGA | pegRNA*3 (TGG-to-TCG PAM |
| | GCTAGAAATAGCAAGTTAAAATAAGGC | silencing edit); contains gRNA core |
| | TAGTCCGTTATCAACTTGAAAAAGTGGC | SEQ ID NO: 1854 |
| | ACCGAGTCGGTGCGAAGGGGCTGCGTA | |
| | CGACACCCGTCGCATT (SEQ ID NO: 878) | |
| 879 | CTTCTCCAATGCGACGGGTGGTTTTAGA | pegRNA*3 (TGG-to-TCG PAM |
| | GCTAGAAATAGCAAGTTAAAATAAGGC | silencing edit); contains gRNA core |
| | TAGTCCGTTATCAACTTGAAAAAGTGGC | SEQ ID NO: 1854 |
| | ACCGAGTCGGTGCTCGAAGGGGCTGCG | |
| | TACGACACCCGTCGCA (SEQ ID NO: 879) | |
| 880 | CTTCTCCAATGCGACGGGTGGTTTTAGA | pegRNA*1 (TGG-to-TAG PAM |
| | GCTAGAAATAGCAAGTTAAAATAAGGC | silencing edit); contains gRNA core |
| | TAGTCCGTTATCAACTTGAAAAAGTGGC | SEQ ID NO: 1854 |
| | ACCGAGTCGGTGCGAAGGGGCTGCGTA | |
| | CTACACCCGTCGCATT (SEQ ID NO: 880) | |
| 881 | CTTCTCCAATGCGACGGGTGGTTTTAGA | pegRNA*1 (TGG-to-TAG PAM |
| | GCTAGAAATAGCAAGTTAAAATAAGGC | silencing edit); contains gRNA core |
| | TAGTCCGTTATCAACTTGAAAAAGTGGC | SEQ ID NO: 1854 |
| | ACCGAGTCGGTGCTCGAAGGGGCTGCG | |
| | TACTACACCCGTCGCA (SEQ ID NO: 881) | |
| 882 | CTTCTCCAATGCGACGGGTGGTTTTAGA | pegRNA*2 (TGG-to-TTG PAM |
| | GCTAGAAATAGCAAGTTAAAATAAGGC | silencing edit); contains gRNA core |
| | TAGTCCGTTATCAACTTGAAAAAGTGGC | SEQ ID NO: 1854 |
| | ACCGAGTCGGTGCGAAGGGGCTGCGTA | |
| | CAACACCCGTCGCATT (SEQ ID NO: 882) | |
| 883 | CTTCTCCAATGCGACGGGTGGTTTTAGA | pegRNA*2 (TGG-to-TTG PAM |
| | GCTAGAAATAGCAAGTTAAAATAAGGC | silencing edit); contains gRNA core |
| | TAGTCCGTTATCAACTTGAAAAAGTGGC | SEQ ID NO: 1854 |
| | ACCGAGTCGGTGCTCGAAGGGGCTGCG | |
| | TACAACACCCGTCGCA (SEQ ID NO: 883) | |
| 884 | GCTTCTCCAATGCGACGGGTGGTTTTAG | pegRNA*1 (TGG-to-TAG PAM |
| | AGCTAGAAATAGCAAGTTAAAATAAGG | silencing edit); contains gRNA core |
| | CTAGTCCGTTATCAACTTGAAAAAGTGG | SEQ ID NO: 1854 |
| | CACCGAGTCGGTGCGAAGGGGCTGCGT | |
| | ACTACACCCGTCGCAT (SEQ ID NO: 884) | |
| 885 | CTTCTCCAATGCGACGGGTGGTTTTAGA | pegRNA*3 (TGG-to-TCG PAM |
| | GCTAGAAATAGCAAGTTAAAATAAGGC | silencing edit); contains gRNA core |
| | TAGTCCGTTATCAACTTGAAAAAGTGGC | SEQ ID NO: 1854 |
| | ACCGAGTCGGTGCGAAGGGGCTGCGTA | |
| | CGACACCCGTCGCATTG (SEQ ID NO: | |
| | 885) | |
| 886 | CTTCTCCAATGCGACGGGTGGTTTTAGA | pegRNA*3 (TGG-to-TCG PAM |
| | GCTAGAAATAGCAAGTTAAAATAAGGC | silencing edit); contains gRNA core |
| | TAGTCCGTTATCAACTTGAAAAAGTGGC | SEQ ID NO: 1854 |
| | ACCGAGTCGGTGCTCGAAGGGGCTGCG | |
| | TACGACACCCGTCGCAT (SEQ ID NO: | |
| | 886) | |
| 887 | CTTCTCCAATGCGACGGGTGGTTTTAGA | pegRNA*1 (TGG-to-TAG PAM |
| | GCTAGAAATAGCAAGTTAAAATAAGGC | silencing edit); contains gRNA core |
| | TAGTCCGTTATCAACTTGAAAAAGTGGC | SEQ ID NO: 1854 |
| | ACCGAGTCGGTGCGAAGGGGCTGCGTA | |
| | CTACACCCGTCGCATTG (SEQ ID NO: | |
| | 887) | |
| 888 | CTTCTCCAATGCGACGGGTGGTTTTAGA | pegRNA*1 (TGG-to-TAG PAM |
| | GCTAGAAATAGCAAGTTAAAATAAGGC | silencing edit); contains gRNA core |
| | TAGTCCGTTATCAACTTGAAAAAGTGGC | SEQ ID NO: 1854 |
| | ACCGAGTCGGTGCTCGAAGGGGCTGCG | |
| | TACTACACCCGTCGCAT (SEQ ID NO: | |
| | 888) | |
| 889 | CTTCTCCAATGCGACGGGTGGTTTTAGA | pegRNA; contains gRNA core SEQ ID |
| | GCTAGAAATAGCAAGTTAAAATAAGGC | NO: 1854 |
| | TAGTCCGTTATCAACTTGAAAAAGTGGC | |
| | ACCGAGTCGGTGCGAAGGGGCTGCGTA | |
| | CCACACCCGTCGCATTG (SEQ ID NO: | |
| | 889) | |
| 890 | CTTCTCCAATGCGACGGGTGGTTTTAGA | pegRNA; contains gRNA core SEQ ID |
| | GCTAGAAATAGCAAGTTAAAATAAGGC | NO: 1854 |
| | TAGTCCGTTATCAACTTGAAAAAGTGGC | |
| | ACCGAGTCGGTGCTCGAAGGGGCTGCG | |
| | TACCACACCCGTCGCAT (SEQ ID NO: | |
| | 890) | |
| 891 | CTTCTCCAATGCGACGGGTGGTTTTAGA | pegRNA*2 (TGG-to-TTG PAM |
| | GCTAGAAATAGCAAGTTAAAATAAGGC | silencing edit); contains gRNA core |
| | TAGTCCGTTATCAACTTGAAAAAGTGGC | SEQ ID NO: 1854 |
| | ACCGAGTCGGTGCGAAGGGGCTGCGTA | |
| | CAACACCCGTCGCATTG (SEQ ID NO: | |
| | 891) | |
| 892 | CTTCTCCAATGCGACGGGTGGTTTTAGA | pegRNA*2 (TGG-to-TTG PAM |
| | GCTAGAAATAGCAAGTTAAAATAAGGC | silencing edit); contains gRNA core |
| | TAGTCCGTTATCAACTTGAAAAAGTGGC | SEQ ID NO: 1854 |
| | ACCGAGTCGGTGCTCGAAGGGGCTGCG | |
| | TACAACACCCGTCGCAT (SEQ ID NO: | |
| | 892) | |
| 893 | GCTTCTCCAATGCGACGGGTGGTTTTAG | pegRNA*1 (TGG-to-TAG PAM |
| | AGCTAGAAATAGCAAGTTAAAATAAGG | silencing edit); contains gRNA core |
| | CTAGTCCGTTATCAACTTGAAAAAGTGG | SEQ ID NO: 1854 |
| | CACCGAGTCGGTGCTCGAAGGGGCTGC | |
| | GTACTACACCCGTCGCA (SEQ ID NO: | |
| | 893) | |
| 894 | CTTCTCCAATGCGACGGGTGGTTTTAGA | pegRNA; contains gRNA core SEQ ID |
| | GCTAGAAATAGCAAGTTAAAATAAGGC | NO: 1854, and TTTT (sequence number |
| | TAGTCCGTTATCAACTTGAAAAAGTGGC | 1860) 3′ terminal sequence |
| | ACCGAGTCGGTGCGAAGGGGCTGCGTA | |
| | CCACACCCGTCGCATTTT (SEQ ID NO: | |
| | 894) | |
| 895 | CTTCTCCAATGCGACGGGTGGTTTTAGA | pegRNA; contains gRNA core SEQ ID |
| | GCTAGAAATAGCAAGTTAAAATAAGGC | NO: 1854 |
| | TAGTCCGTTATCAACTTGAAAAAGTGGC | |
| | ACCGAGTCGGTGCGAAGGGGCTGCGTA | |
| | CCACACCCGTCGCATTGG (SEQ ID NO: | |
| | 895) | |
| 896 | CTTCTCCAATGCGACGGGTGGTTTTAGA | pegRNA; contains gRNA core SEQ ID |
| | GCTAGAAATAGCAAGTTAAAATAAGGC | NO: 1854 |
| | TAGTCCGTTATCAACTTGAAAAAGTGGC | |
| | ACCGAGTCGGTGCTCGAAGGGGCTGCG | |
| | TACCACACCCGTCGCATT (SEQ ID NO: | |
| | 896) | |
| 897 | CTTCTCCAATGCGACGGGTGGTTTTAGA | pegRNA; contains gRNA core SEQ ID |
| | GCTAGAAATAGCAAGTTAAAATAAGGC | NO: 1854 |
| | TAGTCCGTTATCAACTTGAAAAAGTGGC | |
| | ACCGAGTCGGTGCACTCGAAGGGGCTG | |
| | CGTACCACACCCGTCGCA (SEQ ID NO: | |
| | 897) | |
| 898 | CTTCTCCAATGCGACGGGTGGTTTTAGA | pegRNA*3 (TGG-to-TCG PAM |
| | GCTAGAAATAGCAAGTTAAAATAAGGC | silencing edit); contains gRNA core |
| | TAGTCCGTTATCAACTTGAAAAAGTGGC | SEQ ID NO: 1854 |
| | ACCGAGTCGGTGCGAAGGGGCTGCGTA | |
| | CGACACCCGTCGCATTGG (SEQ ID NO: | |
| | 898) | |
| 899 | CTTCTCCAATGCGACGGGTGGTTTTAGA | pegRNA*3 (TGG-to-TCG PAM |
| | GCTAGAAATAGCAAGTTAAAATAAGGC | silencing edit); contains gRNA core |
| | TAGTCCGTTATCAACTTGAAAAAGTGGC | SEQ ID NO: 1854 |
| | ACCGAGTCGGTGCTCGAAGGGGCTGCG | |
| | TACGACACCCGTCGCATT (SEQ ID NO: | |
| | 899) | |
| 900 | CTTCTCCAATGCGACGGGTGGTTTTAGA | pegRNA*1 (TGG-to-TAG PAM |
| | GCTAGAAATAGCAAGTTAAAATAAGGC | silencing edit); contains gRNA core |
| | TAGTCCGTTATCAACTTGAAAAAGTGGC | SEQ ID NO: 1854 |
| | ACCGAGTCGGTGCGAAGGGGCTGCGTA | |
| | CTACACCCGTCGCATTGG (SEQ ID NO: | |
| | 900) | |
| 901 | CTTCTCCAATGCGACGGGTGGTTTTAGA | pegRNA*1 (TGG-to-TAG PAM |
| | GCTAGAAATAGCAAGTTAAAATAAGGC | silencing edit); contains gRNA core |
| | TAGTCCGTTATCAACTTGAAAAAGTGGC | SEQ ID NO: 1854 |
| | ACCGAGTCGGTGCTCGAAGGGGCTGCG | |
| | TACTACACCCGTCGCATT (SEQ ID NO: | |
| | 901) | |
| 902 | CTTCTCCAATGCGACGGGTGGTTTTAGA | pegRNA*2 (TGG-to-TTG PAM |
| | GCTAGAAATAGCAAGTTAAAATAAGGC | silencing edit); contains gRNA core |
| | TAGTCCGTTATCAACTTGAAAAAGTGGC | SEQ ID NO: 1854 |
| | ACCGAGTCGGTGCGAAGGGGCTGCGTA | |
| | CAACACCCGTCGCATTGG (SEQ ID NO: | |
| | 902) | |
| 903 | CTTCTCCAATGCGACGGGTGGTTTTAGA | pegRNA*2 (TGG-to-TTG PAM |
| | GCTAGAAATAGCAAGTTAAAATAAGGC | silencing edit); contains gRNA core |
| | TAGTCCGTTATCAACTTGAAAAAGTGGC | SEQ ID NO: 1854 |
| | ACCGAGTCGGTGCTCGAAGGGGCTGCG | |
| | TACAACACCCGTCGCATT (SEQ ID NO: | |
| | 903) | |
| 904 | GCTTCTCCAATGCGACGGGTGGTTTTAG | pegRNA*3 (TGG-to-TCG PAM |
| | AGCTAGAAATAGCAAGTTAAAATAAGG | silencing edit); contains gRNA core |
| | CTAGTCCGTTATCAACTTGAAAAAGTGG | SEQ ID NO: 1854 |
| | CACCGAGTCGGTGCTCGAAGGGGCTGC | |
| | GTACGACACCCGTCGCAT (SEQ ID NO: | |
| | 904) | |
| 905 | CTTCTCCAATGCGACGGGTGGTTTTAGA | pegRNA*3 (TGG-to-TCG PAM |
| | GCTAGAAATAGCAAGTTAAAATAAGGC | silencing edit); contains gRNA core |
| | TAGTCCGTTATCAACTTGAAAAAGTGGC | SEQ ID NO: 1854 |
| | ACCGAGTCGGTGCGAAGGGGCTGCGTA | |
| | CGACACCCGTCGCATTGGA (SEQ ID NO: | |
| | 905) | |
| 906 | CTTCTCCAATGCGACGGGTGGTTTTAGA | pegRNA*3 (TGG-to-TCG PAM |
| | GCTAGAAATAGCAAGTTAAAATAAGGC | silencing edit); contains gRNA core |
| | TAGTCCGTTATCAACTTGAAAAAGTGGC | SEQ ID NO: 1854 |
| | ACCGAGTCGGTGCTCGAAGGGGCTGCG | |
| | TACGACACCCGTCGCATTG (SEQ ID NO: | |
| | 906) | |
| 907 | CTTCTCCAATGCGACGGGTGGTTTTAGA | pegRNA*1 (TGG-to-TAG PAM |
| | GCTAGAAATAGCAAGTTAAAATAAGGC | silencing edit); contains gRNA core |
| | TAGTCCGTTATCAACTTGAAAAAGTGGC | SEQ ID NO: 1854 |
| | ACCGAGTCGGTGCGAAGGGGCTGCGTA | |
| | CTACACCCGTCGCATTGGA (SEQ ID NO: | |
| | 907) | |
| 908 | CTTCTCCAATGCGACGGGTGGTTTTAGA | pegRNA*1 (TGG-to-TAG PAM |
| | GCTAGAAATAGCAAGTTAAAATAAGGC | silencing edit); contains gRNA core |
| | TAGTCCGTTATCAACTTGAAAAAGTGGC | SEQ ID NO: 1854 |
| | ACCGAGTCGGTGCTCGAAGGGGCTGCG | |
| | TACTACACCCGTCGCATTG (SEQ ID NO: | |
| | 908) | |
| 909 | CTTCTCCAATGCGACGGGTGGTTTTAGA | pegRNA; contains gRNA core SEQ ID |
| | GCTAGAAATAGCAAGTTAAAATAAGGC | NO: 1854 |
| | TAGTCCGTTATCAACTTGAAAAAGTGGC | |
| | ACCGAGTCGGTGCGAAGGGGCTGCGTA | |
| | CCACACCCGTCGCATTGGA (SEQ ID NO: | |
| | 909) | |
| 910 | CTTCTCCAATGCGACGGGTGGTTTTAGA | pegRNA; contains gRNA core SEQ ID |
| | GCTAGAAATAGCAAGTTAAAATAAGGC | NO: 1854 |
| | TAGTCCGTTATCAACTTGAAAAAGTGGC | |
| | ACCGAGTCGGTGCTCGAAGGGGCTGCG | |
| | TACCACACCCGTCGCATTG (SEQ ID NO: | |
| | 910) | |
| 911 | CTTCTCCAATGCGACGGGTGGTTTTAGA | pegRNA*2 (TGG-to-TTG PAM |
| | GCTAGAAATAGCAAGTTAAAATAAGGC | silencing edit); contains gRNA core |
| | TAGTCCGTTATCAACTTGAAAAAGTGGC | SEQ ID NO: 1854 |
| | ACCGAGTCGGTGCGAAGGGGCTGCGTA | |
| | CAACACCCGTCGCATTGGA (SEQ ID NO: | |
| | 911) | |
| 912 | CTTCTCCAATGCGACGGGTGGTTTTAGA | pegRNA*2 (TGG-to-TTG PAM |
| | GCTAGAAATAGCAAGTTAAAATAAGGC | silencing edit); contains gRNA core |
| | TAGTCCGTTATCAACTTGAAAAAGTGGC | SEQ ID NO: 1854 |
| | ACCGAGTCGGTGCTCGAAGGGGCTGCG | |
| | TACAACACCCGTCGCATTG (SEQ ID NO: | |
| | 912) | |
| 913 | GCTTCTCCAATGCGACGGGTGGTTTTAG | pegRNA*1 (TGG-to-TAG PAM |
| | AGCTAGAAATAGCAAGTTAAAATAAGG | silencing edit); contains gRNA core |
| | CTAGTCCGTTATCAACTTGAAAAAGTGG | SEQ ID NO: 1854 |
| | CACCGAGTCGGTGCTCGAAGGGGCTGC | |
| | GTACTACACCCGTCGCATT (SEQ ID NO: | |
| | 913) | |
| 914 | GCTTCTCCAATGCGACGGGTGGTTTTAG | pegRNA*1 (TGG-to-TAG PAM |
| | AGCTAGAAATAGCAAGTTAAAATAAGG | silencing edit); contains gRNA core |
| | CTAGTCCGTTATCAACTTGAAAAAGTGG | SEQ ID NO: 1854 |
| | CACCGAGTCGGTGCGAAGGGGCTGCGT | |
| | ACTACACCCGTCGCATTGG (SEQ ID NO: | |
| | 914) | |
| 915 | CTTCTCCAATGCGACGGGTGGTTTTAGA | pegRNA; contains gRNA core SEQ ID |
| | GCTAGAAATAGCAAGTTAAAATAAGGC | NO: 1854, and TTTT (sequence number |
| | TAGTCCGTTATCAACTTGAAAAAGTGGC | 1860) 3′ terminal sequence |
| | ACCGAGTCGGTGCTCGAAGGGGCTGCG | |
| | TACCACACCCGTCGCATTTT (SEQ ID | |
| | NO: 915) | |
| 916 | CTTCTCCAATGCGACGGGTGGTTTTAGA | pegRNA; contains gRNA core SEQ ID |
| | GCTAGAAATAGCAAGTTAAAATAAGGC | NO: 1854, and TTTT (sequence number |
| | TAGTCCGTTATCAACTTGAAAAAGTGGC | 1860) 3′ terminal sequence |
| | ACCGAGTCGGTGCGAAGGGGCTGCGTA | |
| | CCACACCCGTCGCATTTTTT (SEQ ID NO: | |
| | 916) | |
| 917 | CTTCTCCAATGCGACGGGTGGTTTTAGA | pegRNA; contains gRNA core SEQ ID |
| | GCTAGAAATAGCAAGTTAAAATAAGGC | NO: 1854 |
| | TAGTCCGTTATCAACTTGAAAAAGTGGC | |
| | ACCGAGTCGGTGCGAAGGGGCTGCGTA | |
| | CCACACCCGTCGCATTGGAG (SEQ ID | |
| | NO: 917) | |
| 918 | CTTCTCCAATGCGACGGGTGGTTTTAGA | pegRNA; contains gRNA core SEQ ID |
| | GCTAGAAATAGCAAGTTAAAATAAGGC | NO: 1854 |
| | TAGTCCGTTATCAACTTGAAAAAGTGGC | |
| | ACCGAGTCGGTGCTCGAAGGGGCTGCG | |
| | TACCACACCCGTCGCATTGG (SEQ ID | |
| | NO: 918) | |
| 919 | CTTCTCCAATGCGACGGGTGGTTTTAGA | pegRNA; contains gRNA core SEQ ID |
| | GCTAGAAATAGCAAGTTAAAATAAGGC | NO: 1854 |
| | TAGTCCGTTATCAACTTGAAAAAGTGGC | |
| | ACCGAGTCGGTGCACTCGAAGGGGCTG | |
| | CGTACCACACCCGTCGCATT (SEQ ID | |
| | NO: 919) | |
| 920 | CTTCTCCAATGCGACGGGTGGTTTTAGA | pegRNA; contains gRNA core SEQ ID |
| | GCTAGAAATAGCAAGTTAAAATAAGGC | NO: 1854 |
| | TAGTCCGTTATCAACTTGAAAAAGTGGC | |
| | ACCGAGTCGGTGCGTACTCGAAGGGGC | |
| | TGCGTACCACACCCGTCGCA (SEQ ID | |
| | NO: 920) | |
| 921 | CTTCTCCAATGCGACGGGTGGTTTTAGA | pegRNA*3 (TGG-to-TCG PAM |
| | GCTAGAAATAGCAAGTTAAAATAAGGC | silencing edit); contains gRNA core |
| | TAGTCCGTTATCAACTTGAAAAAGTGGC | SEQ ID NO: 1854 |
| | ACCGAGTCGGTGCGAAGGGGCTGCGTA | |
| | CGACACCCGTCGCATTGGAG (SEQ ID | |
| | NO: 921) | |
| 922 | CTTCTCCAATGCGACGGGTGGTTTTAGA | pegRNA*3 (TGG-to-TCG PAM |
| | GCTAGAAATAGCAAGTTAAAATAAGGC | silencing edit); contains gRNA core |
| | TAGTCCGTTATCAACTTGAAAAAGTGGC | SEQ ID NO: 1854 |
| | ACCGAGTCGGTGCTCGAAGGGGCTGCG | |
| | TACGACACCCGTCGCATTGG (SEQ ID | |
| | NO: 922) | |
| 923 | CTTCTCCAATGCGACGGGTGGTTTTAGA | pegRNA*1 (TGG-to-TAG PAM |
| | GCTAGAAATAGCAAGTTAAAATAAGGC | silencing edit); contains gRNA core |
| | TAGTCCGTTATCAACTTGAAAAAGTGGC | SEQ ID NO: 1854 |
| | ACCGAGTCGGTGCGAAGGGGCTGCGTA | |
| | CTACACCCGTCGCATTGGAG (SEQ ID | |
| | NO: 923) | |
| 924 | CTTCTCCAATGCGACGGGTGGTTTTAGA | pegRNA*1 (TGG-to-TAG PAM |
| | GCTAGAAATAGCAAGTTAAAATAAGGC | silencing edit); contains gRNA core |
| | TAGTCCGTTATCAACTTGAAAAAGTGGC | SEQ ID NO: 1854 |
| | ACCGAGTCGGTGCTCGAAGGGGCTGCG | |
| | TACTACACCCGTCGCATTGG (SEQ ID | |
| | NO: 924) | |
| 925 | CTTCTCCAATGCGACGGGTGGTTTTAGA | pegRNA*2 (TGG-to-TTG PAM |
| | GCTAGAAATAGCAAGTTAAAATAAGGC | silencing edit); contains gRNA core |
| | TAGTCCGTTATCAACTTGAAAAAGTGGC | SEQ ID NO: 1854 |
| | ACCGAGTCGGTGCGAAGGGGCTGCGTA | |
| | CAACACCCGTCGCATTGGAG (SEQ ID | |
| | NO: 925) | |
| 926 | CTTCTCCAATGCGACGGGTGGTTTTAGA | pegRNA*2 (TGG-to-TTG PAM |
| | GCTAGAAATAGCAAGTTAAAATAAGGC | silencing edit); contains gRNA core |
| | TAGTCCGTTATCAACTTGAAAAAGTGGC | SEQ ID NO: 1854 |
| | ACCGAGTCGGTGCTCGAAGGGGCTGCG | |
| | TACAACACCCGTCGCATTGG (SEQ ID | |
| | NO: 926) | |
| 927 | CTTCTCCAATGCGACGGGTGGTTTAAGA | pegRNA*3 (TGG-to-TCG PAM |
| | GCTAGAAATAGCAAGTTTAAATAAGGC | silencing edit); contains gRNA core |
| | TAGTCCGTTATCAACTTGAAAAAGTGGC | SEQ ID NO: 1855 |
| | ACCGAGTCGGTGCTCGAAGGGGCTGCG | |
| | TACGACACCCGTCGCATTGG (SEQ ID | |
| | NO: 927) | |
| 928 | CTTCTCCAATGCGACGGGTGGTTTAAGA | pegRNA*3 (TGG-to-TCG PAM |
| | GCTAGAAATAGCAAGTTTAAATAAGGC | silencing edit); contains gRNA core |
| | TAGTCCGTTATCAGCGTGAAAACGCGG | SEQ ID NO: 1856 |
| | CACCGAGTCGGTGCTCGAAGGGGCTGC | |
| | GTACGACACCCGTCGCATTGG (SEQ ID | |
| | NO: 928) | |
| 929 | GCTTCTCCAATGCGACGGGTGGTTTTAG | pegRNA*1 (TGG-to-TAG PAM |
| | AGCTAGAAATAGCAAGTTAAAATAAGG | silencing edit); contains gRNA core |
| | CTAGTCCGTTATCAACTTGAAAAAGTGG | SEQ ID NO: 1854 |
| | CACCGAGTCGGTGCTCGAAGGGGCTGC | |
| | GTACTACACCCGTCGCATTG (SEQ ID | |
| | NO: 929) | |
| 930 | CTTCTCCAATGCGACGGGTGGTTTTAGA | pegRNA*3 (TGG-to-TCG PAM |
| | GCTAGAAATAGCAAGTTAAAATAAGGC | silencing edit); contains gRNA core |
| | TAGTCCGTTATCAACTTGAAAAAGTGGC | SEQ ID NO: 1854 |
| | ACCGAGTCGGTGCGAAGGGGCTGCGTA | |
| | CGACACCCGTCGCATTGGAGA (SEQ ID | |
| | NO: 930) | |
| 931 | CTTCTCCAATGCGACGGGTGGTTTTAGA | pegRNA*3 (TGG-to-TCG PAM |
| | GCTAGAAATAGCAAGTTAAAATAAGGC | silencing edit); contains gRNA core |
| | TAGTCCGTTATCAACTTGAAAAAGTGGC | SEQ ID NO: 1854 |
| | ACCGAGTCGGTGCTCGAAGGGGCTGCG | |
| | TACGACACCCGTCGCATTGGA (SEQ ID | |
| | NO: 931) | |
| 932 | CTTCTCCAATGCGACGGGTGGTTTTAGA | pegRNA*1 (TGG-to-TAG PAM |
| | GCTAGAAATAGCAAGTTAAAATAAGGC | silencing edit); contains gRNA core |
| | TAGTCCGTTATCAACTTGAAAAAGTGGC | SEQ ID NO: 1854 |
| | ACCGAGTCGGTGCGAAGGGGCTGCGTA | |
| | CTACACCCGTCGCATTGGAGA (SEQ ID | |
| | NO: 932) | |
| 933 | CTTCTCCAATGCGACGGGTGGTTTTAGA | pegRNA*1 (TGG-to-TAG PAM |
| | GCTAGAAATAGCAAGTTAAAATAAGGC | silencing edit); contains gRNA core |
| | TAGTCCGTTATCAACTTGAAAAAGTGGC | SEQ ID NO: 1854 |
| | ACCGAGTCGGTGCTCGAAGGGGCTGCG | |
| | TACTACACCCGTCGCATTGGA (SEQ ID | |
| | NO: 933) | |
| 934 | CTTCTCCAATGCGACGGGTGGTTTTAGA | pegRNA; contains gRNA core SEQ ID |
| | GCTAGAAATAGCAAGTTAAAATAAGGC | NO: 1854 |
| | TAGTCCGTTATCAACTTGAAAAAGTGGC | |
| | ACCGAGTCGGTGCGAAGGGGCTGCGTA | |
| | CCACACCCGTCGCATTGGAGA (SEQ ID | |
| | NO: 934) | |
| 935 | CTTCTCCAATGCGACGGGTGGTTTTAGA | pegRNA; contains gRNA core SEQ ID |
| | GCTAGAAATAGCAAGTTAAAATAAGGC | NO: 1854 |
| | TAGTCCGTTATCAACTTGAAAAAGTGGC | |
| | ACCGAGTCGGTGCTCGAAGGGGCTGCG | |
| | TACCACACCCGTCGCATTGGA (SEQ ID | |
| | NO: 935) | |
| 936 | CTTCTCCAATGCGACGGGTGGTTTTAGA | pegRNA*2 (TGG-to-TTG PAM |
| | GCTAGAAATAGCAAGTTAAAATAAGGC | silencing edit); contains gRNA core |
| | TAGTCCGTTATCAACTTGAAAAAGTGGC | SEQ ID NO: 1854 |
| | ACCGAGTCGGTGCGAAGGGGCTGCGTA | |
| | CAACACCCGTCGCATTGGAGA (SEQ ID | |
| | NO: 936) | |
| 937 | CTTCTCCAATGCGACGGGTGGTTTTAGA | pegRNA*2 (TGG-to-TTG PAM |
| | GCTAGAAATAGCAAGTTAAAATAAGGC | silencing edit); contains gRNA core |
| | TAGTCCGTTATCAACTTGAAAAAGTGGC | SEQ ID NO: 1854 |
| | ACCGAGTCGGTGCTCGAAGGGGCTGCG | |
| | TACAACACCCGTCGCATTGGA (SEQ ID | |
| | NO: 937) | |
| 938 | GCTTCTCCAATGCGACGGGTGGTTTTAG | pegRNA*3 (TGG-to-TCG PAM |
| | AGCTAGAAATAGCAAGTTAAAATAAGG | silencing edit); contains gRNA core |
| | CTAGTCCGTTATCAACTTGAAAAAGTGG | SEQ ID NO: 1854 |
| | CACCGAGTCGGTGCTCGAAGGGGCTGC | |
| | GTACGACACCCGTCGCATTGG (SEQ ID | |
| | NO: 938) | |
| 939 | CTTCTCCAATGCGACGGGTGGTTTTAGA | pegRNA; contains gRNA core SEQ ID |
| | GCTAGAAATAGCAAGTTAAAATAAGGC | NO: 1854, and TTTT (sequence number |
| | TAGTCCGTTATCAACTTGAAAAAGTGGC | 1860) 3′ terminal sequence |
| | ACCGAGTCGGTGCACTCGAAGGGGCTG | |
| | CGTACCACACCCGTCGCATTTT (SEQ ID | |
| | NO: 939) | |
| 940 | CTTCTCCAATGCGACGGGTGGTTTTAGA | pegRNA; contains gRNA core SEQ ID |
| | GCTAGAAATAGCAAGTTAAAATAAGGC | NO: 1854, and TTTT (sequence number |
| | TAGTCCGTTATCAACTTGAAAAAGTGGC | 1860) 3′ terminal sequence |
| | ACCGAGTCGGTGCTCGAAGGGGCTGCG | |
| | TACCACACCCGTCGCATTTTTT (SEQ ID | |
| | NO: 940) | |
| 941 | CTTCTCCAATGCGACGGGTGGTTTTAGA | pegRNA; contains gRNA core SEQ ID |
| | GCTAGAAATAGCAAGTTAAAATAAGGC | NO: 1854, and TTTT (sequence number |
| | TAGTCCGTTATCAACTTGAAAAAGTGGC | 1860) 3′ terminal sequence |
| | ACCGAGTCGGTGCGAAGGGGCTGCGTA | |
| | CCACACCCGTCGCATTGGTTTT (SEQ ID | |
| | NO: 941) | |
| 942 | CTTCTCCAATGCGACGGGTGGTTTTAGA | pegRNA; contains gRNA core SEQ ID |
| | GCTAGAAATAGCAAGTTAAAATAAGGC | NO: 1854 |
| | TAGTCCGTTATCAACTTGAAAAAGTGGC | |
| | ACCGAGTCGGTGCTCGAAGGGGCTGCG | |
| | TACCACACCCGTCGCATTGGAG (SEQ ID | |
| | NO: 942) | |
| 943 | CTTCTCCAATGCGACGGGTGGTTTTAGA | pegRNA; contains gRNA core SEQ ID |
| | GCTAGAAATAGCAAGTTAAAATAAGGC | NO: 1854 |
| | TAGTCCGTTATCAACTTGAAAAAGTGGC | |
| | ACCGAGTCGGTGCACTCGAAGGGGCTG | |
| | CGTACCACACCCGTCGCATTGG (SEQ ID | |
| | NO: 943) | |
| 944 | CTTCTCCAATGCGACGGGTGGTTTTAGA | pegRNA; contains gRNA core SEQ ID |
| | GCTAGAAATAGCAAGTTAAAATAAGGC | NO: 1854 |
| | TAGTCCGTTATCAACTTGAAAAAGTGGC | |
| | ACCGAGTCGGTGCGTACTCGAAGGGGC | |
| | TGCGTACCACACCCGTCGCATT (SEQ ID | |
| | NO: 944) | |
| 945 | CTTCTCCAATGCGACGGGTGGTTTTAGA | pegRNA; contains gRNA core SEQ ID |
| | GCTAGAAATAGCAAGTTAAAATAAGGC | NO: 1854 |
| | TAGTCCGTTATCAACTTGAAAAAGTGGC | |
| | ACCGAGTCGGTGCGGGTACTCGAAGGG | |
| | GCTGCGTACCACACCCGTCGCA (SEQ ID | |
| | NO: 945) | |
| 946 | CTTCTCCAATGCGACGGGTGGTTTTAGA | pegRNA*3 (TGG-to-TCG PAM |
| | GCTAGAAATAGCAAGTTAAAATAAGGC | silencing edit); contains gRNA core |
| | TAGTCCGTTATCAACTTGAAAAAGTGGC | SEQ ID NO: 1854 |
| | ACCGAGTCGGTGCGAAGGGGCTGCGTA | |
| | CGACACCCGTCGCATTGGAGAA (SEQ ID | |
| | NO: 946) | |
| 947 | CTTCTCCAATGCGACGGGTGGTTTTAGA | pegRNA*3 (TGG-to-TCG PAM |
| | GCTAGAAATAGCAAGTTAAAATAAGGC | silencing edit); contains gRNA core |
| | TAGTCCGTTATCAACTTGAAAAAGTGGC | SEQ ID NO: 1854 |
| | ACCGAGTCGGTGCTCGAAGGGGCTGCG | |
| | TACGACACCCGTCGCATTGGAG (SEQ ID | |
| | NO: 947) | |
| 948 | CTTCTCCAATGCGACGGGTGGTTTTAGA | pegRNA*1 (TGG-to-TAG PAM |
| | GCTAGAAATAGCAAGTTAAAATAAGGC | silencing edit); contains gRNA core |
| | TAGTCCGTTATCAACTTGAAAAAGTGGC | SEQ ID NO: 1854 |
| | ACCGAGTCGGTGCGAAGGGGCTGCGTA | |
| | CTACACCCGTCGCATTGGAGAA (SEQ ID | |
| | NO: 948) | |
| 949 | CTTCTCCAATGCGACGGGTGGTTTTAGA | pegRNA*1 (TGG-to-TAG PAM |
| | GCTAGAAATAGCAAGTTAAAATAAGGC | silencing edit); contains gRNA core |
| | TAGTCCGTTATCAACTTGAAAAAGTGGC | SEQ ID NO: 1854 |
| | ACCGAGTCGGTGCTCGAAGGGGCTGCG | |
| | TACTACACCCGTCGCATTGGAG (SEQ ID | |
| | NO: 949) | |
| 950 | CTTCTCCAATGCGACGGGTGGTTTTAGA | pegRNA; contains gRNA core SEQ ID |
| | GCTAGAAATAGCAAGTTAAAATAAGGC | NO: 1854 |
| | TAGTCCGTTATCAACTTGAAAAAGTGGC | |
| | ACCGAGTCGGTGCGAAGGGGCTGCGTA | |
| | CCACACCCGTCGCATTGGAGAA (SEQ ID | |
| | NO: 950) | |
| 951 | CTTCTCCAATGCGACGGGTGGTTTTAGA | pegRNA*2 (TGG-to-TTG PAM |
| | GCTAGAAATAGCAAGTTAAAATAAGGC | silencing edit); contains gRNA core |
| | TAGTCCGTTATCAACTTGAAAAAGTGGC | SEQ ID NO: 1854 |
| | ACCGAGTCGGTGCGAAGGGGCTGCGTA | |
| | CAACACCCGTCGCATTGGAGAA (SEQ ID | |
| | NO: 951) | |
| 952 | CTTCTCCAATGCGACGGGTGGTTTTAGA | pegRNA*2 (TGG-to-TTG PAM |
| | GCTAGAAATAGCAAGTTAAAATAAGGC | silencing edit); contains gRNA core |
| | TAGTCCGTTATCAACTTGAAAAAGTGGC | SEQ ID NO: 1854 |
| | ACCGAGTCGGTGCTCGAAGGGGCTGCG | |
| | TACAACACCCGTCGCATTGGAG (SEQ ID | |
| | NO: 952) | |
| 953 | CTTCTCCAATGCGACGGGTGGTTTAAGA | pegRNA*3 (TGG-to-TCG PAM |
| | GCGGGGAAATCCGCAAGTTTAAATAAG | silencing edit); contains gRNA core |
| | GCTAGTCCGTTATCAGCGTGAAAACGC | SEQ ID NO: 1857 |
| | GGCACCGAGTCGGTGCTCGAAGGGGCT | |
| | GCGTACGACACCCGTCGCATTGG (SEQ | |
| | ID NO: 953) | |
| 954 | GCTTCTCCAATGCGACGGGTGGTTTTAG | pegRNA*1 (TGG-to-TAG PAM |
| | AGCTAGAAATAGCAAGTTAAAATAAGG | silencing edit); contains gRNA core |
| | CTAGTCCGTTATCAACTTGAAAAAGTGG | SEQ ID NO: 1854 |
| | CACCGAGTCGGTGCTCGAAGGGGCTGC | |
| | GTACTACACCCGTCGCATTGGA (SEQ ID | |
| | NO: 954) | |
| 955 | CTTCTCCAATGCGACGGGTGGTTTTAGA | pegRNA*3 (TGG-to-TCG PAM |
| | GCTAGAAATAGCAAGTTAAAATAAGGC | silencing edit); contains gRNA core |
| | TAGTCCGTTATCAACTTGAAAAAGTGGC | SEQ ID NO: 1854 |
| | ACCGAGTCGGTGCTCGAAGGGGCTGCG | |
| | TACGACACCCGTCGCATTGGAGA (SEQ | |
| | ID NO: 955) | |
| 956 | CTTCTCCAATGCGACGGGTGGTTTTAGA | pegRNA*1 (TGG-to-TAG PAM |
| | GCTAGAAATAGCAAGTTAAAATAAGGC | silencing edit); contains gRNA core |
| | TAGTCCGTTATCAACTTGAAAAAGTGGC | SEQ ID NO: 1854 |
| | ACCGAGTCGGTGCTCGAAGGGGCTGCG | |
| | TACTACACCCGTCGCATTGGAGA (SEQ | |
| | ID NO: 956) | |
| 957 | CTTCTCCAATGCGACGGGTGGTTTTAGA | pegRNA; contains gRNA core SEQ ID |
| | GCTAGAAATAGCAAGTTAAAATAAGGC | NO: 1854 |
| | TAGTCCGTTATCAACTTGAAAAAGTGGC | |
| | ACCGAGTCGGTGCTCGAAGGGGCTGCG | |
| | TACCACACCCGTCGCATTGGAGA (SEQ | |
| | ID NO: 957) | |
| 958 | CTTCTCCAATGCGACGGGTGGTTTTAGA | pegRNA*2 (TGG-to-TTG PAM |
| | GCTAGAAATAGCAAGTTAAAATAAGGC | silencing edit); contains gRNA core |
| | TAGTCCGTTATCAACTTGAAAAAGTGGC | SEQ ID NO: 1854 |
| | ACCGAGTCGGTGCTCGAAGGGGCTGCG | |
| | TACAACACCCGTCGCATTGGAGA (SEQ | |
| | ID NO: 958) | |
| 959 | CTTCTCCAATGCGACGGGTGGTTTTAGA | pegRNA; contains gRNA core SEQ ID |
| | GCTAGAAATAGCAAGTTAAAATAAGGC | NO: 1854, and TTTT (sequence number |
| | TAGTCCGTTATCAACTTGAAAAAGTGGC | 1860) 3′ terminal sequence |
| | ACCGAGTCGGTGCGTACTCGAAGGGGC | |
| | TGCGTACCACACCCGTCGCATTTT (SEQ | |
| | ID NO: 959) | |
| 960 | CTTCTCCAATGCGACGGGTGGTTTTAGA | pegRNA; contains gRNA core SEQ ID |
| | GCTAGAAATAGCAAGTTAAAATAAGGC | NO: 1854, and TTTT (sequence number |
| | TAGTCCGTTATCAACTTGAAAAAGTGGC | 1860) 3′ terminal sequence |
| | ACCGAGTCGGTGCACTCGAAGGGGCTG | |
| | CGTACCACACCCGTCGCATTTTTT (SEQ | |
| | ID NO: 960) | |
| 961 | CTTCTCCAATGCGACGGGTGGTTTTAGA | pegRNA; contains gRNA core SEQ ID |
| | GCTAGAAATAGCAAGTTAAAATAAGGC | NO: 1854, and TTTT (sequence number |
| | TAGTCCGTTATCAACTTGAAAAAGTGGC | 1860) 3′ terminal sequence |
| | ACCGAGTCGGTGCTCGAAGGGGCTGCG | |
| | TACCACACCCGTCGCATTGGTTTT (SEQ | |
| | ID NO: 961) | |
| 962 | CTTCTCCAATGCGACGGGTGGTTTTAGA | pegRNA; contains gRNA core SEQ ID |
| | GCTAGAAATAGCAAGTTAAAATAAGGC | NO: 1854, and TTTT (sequence number |
| | TAGTCCGTTATCAACTTGAAAAAGTGGC | 1860) 3′ terminal sequence |
| | ACCGAGTCGGTGCGAAGGGGCTGCGTA | |
| | CCACACCCGTCGCATTGGAGTTTT (SEQ | |
| | ID NO: 962) | |
| 963 | CTTCTCCAATGCGACGGGTGGTTTTAGA | pegRNA; contains gRNA core SEQ ID |
| | GCTAGAAATAGCAAGTTAAAATAAGGC | NO: 1854 |
| | TAGTCCGTTATCAACTTGAAAAAGTGGC | |
| | ACCGAGTCGGTGCACTCGAAGGGGCTG | |
| | CGTACCACACCCGTCGCATTGGAG (SEQ | |
| | ID NO: 963) | |
| 964 | CTTCTCCAATGCGACGGGTGGTTTTAGA | pegRNA; contains gRNA core SEQ ID |
| | GCTAGAAATAGCAAGTTAAAATAAGGC | NO: 1854 |
| | TAGTCCGTTATCAACTTGAAAAAGTGGC | |
| | ACCGAGTCGGTGCGTACTCGAAGGGGC | |
| | TGCGTACCACACCCGTCGCATTGG (SEQ | |
| | ID NO: 964) | |
| 965 | CTTCTCCAATGCGACGGGTGGTTTTAGA | pegRNA; contains gRNA core SEQ ID |
| | GCTAGAAATAGCAAGTTAAAATAAGGC | NO: 1854 |
| | TAGTCCGTTATCAACTTGAAAAAGTGGC | |
| | ACCGAGTCGGTGCGGGTACTCGAAGGG | |
| | GCTGCGTACCACACCCGTCGCATT (SEQ | |
| | ID NO: 965) | |
| 966 | CTTCTCCAATGCGACGGGTGGTTTTAGA | pegRNA; contains gRNA core SEQ ID |
| | GCTAGAAATAGCAAGTTAAAATAAGGC | NO: 1854 |
| | TAGTCCGTTATCAACTTGAAAAAGTGGC | |
| | ACCGAGTCGGTGCGTGGGTACTCGAAG | |
| | GGGCTGCGTACCACACCCGTCGCA (SEQ | |
| | ID NO: 966) | |
| 967 | CTTCTCCAATGCGACGGGTGGTTTTAGA | pegRNA*3 (TGG-to-TCG PAM |
| | GCTAGAAATAGCAAGTTAAAATAAGGC | silencing edit); contains gRNA core |
| | TAGTCCGTTATCAACTTGAAAAAGTGGC | SEQ ID NO: 1854 |
| | ACCGAGTCGGTGCTCGAAGGGGCTGCG | |
| | TACGACACCCGTCGCATTGGAGAA (SEQ | |
| | ID NO: 967) | |
| 968 | CTTCTCCAATGCGACGGGTGGTTTTAGA | pegRNA*1 (TGG-to-TAG PAM |
| | GCTAGAAATAGCAAGTTAAAATAAGGC | silencing edit); contains gRNA core |
| | TAGTCCGTTATCAACTTGAAAAAGTGGC | SEQ ID NO: 1854 |
| | ACCGAGTCGGTGCTCGAAGGGGCTGCG | |
| | TACTACACCCGTCGCATTGGAGAA (SEQ | |
| | ID NO: 968) | |
| 969 | CTTCTCCAATGCGACGGGTGGTTTTAGA | pegRNA; contains gRNA core SEQ ID |
| | GCTAGAAATAGCAAGTTAAAATAAGGC | NO: 1854 |
| | TAGTCCGTTATCAACTTGAAAAAGTGGC | |
| | ACCGAGTCGGTGCTCGAAGGGGCTGCG | |
| | TACCACACCCGTCGCATTGGAGAA (SEQ | |
| | ID NO: 969) | |
| 970 | CTTCTCCAATGCGACGGGTGGTTTTAGA | pegRNA*2 (TGG-to-TTG PAM |
| | GCTAGAAATAGCAAGTTAAAATAAGGC | silencing edit); contains gRNA core |
| | TAGTCCGTTATCAACTTGAAAAAGTGGC | SEQ ID NO: 1854 |
| | ACCGAGTCGGTGCTCGAAGGGGCTGCG | |
| | TACAACACCCGTCGCATTGGAGAA (SEQ | |
| | ID NO: 970) | |
| 971 | GCTTCTCCAATGCGACGGGTGGTTTTAG | pegRNA*3 (TGG-to-TCG PAM |
| | AGCTAGAAATAGCAAGTTAAAATAAGG | silencing edit); contains gRNA core |
| | CTAGTCCGTTATCAACTTGAAAAAGTGG | SEQ ID NO: 1854 |
| | CACCGAGTCGGTGCTCGAAGGGGCTGC | |
| | GTACGACACCCGTCGCATTGGAGAA | |
| | (SEQ ID NO: 971) | |
| 972 | CTTCTCCAATGCGACGGGTGGTTTTAGA | pegRNA; contains gRNA core SEQ ID |
| | GCTAGAAATAGCAAGTTAAAATAAGGC | NO: 1854, and TTTT (sequence number |
| | TAGTCCGTTATCAACTTGAAAAAGTGGC | 1860) 3′ terminal sequence |
| | ACCGAGTCGGTGCGTACTCGAAGGGGC | |
| | TGCGTACCACACCCGTCGCATTTTTT | |
| | (SEQ ID NO: 972) | |
| 973 | CTTCTCCAATGCGACGGGTGGTTTTAGA | pegRNA; contains gRNA core SEQ ID |
| | GCTAGAAATAGCAAGTTAAAATAAGGC | NO: 1854, and TTTT (sequence number |
| | TAGTCCGTTATCAACTTGAAAAAGTGGC | 1860) 3′ terminal sequence |
| | ACCGAGTCGGTGCACTCGAAGGGGCTG | |
| | CGTACCACACCCGTCGCATTGGTTTT | |
| | (SEQ ID NO: 973) | |
| 974 | CTTCTCCAATGCGACGGGTGGTTTTAGA | pegRNA; contains gRNA core SEQ ID |
| | GCTAGAAATAGCAAGTTAAAATAAGGC | NO: 1854, and TTTT (sequence number |
| | TAGTCCGTTATCAACTTGAAAAAGTGGC | 1860) 3′ terminal sequence |
| | ACCGAGTCGGTGCTCGAAGGGGCTGCG | |
| | TACCACACCCGTCGCATTGGAGTTTT | |
| | (SEQ ID NO: 974) | |
| 975 | CTTCTCCAATGCGACGGGTGGTTTTAGA | pegRNA; contains gRNA core SEQ ID |
| | GCTAGAAATAGCAAGTTAAAATAAGGC | NO: 1854 |
| | TAGTCCGTTATCAACTTGAAAAAGTGGC | |
| | ACCGAGTCGGTGCGTACTCGAAGGGGC | |
| | TGCGTACCACACCCGTCGCATTGGAG | |
| | (SEQ ID NO: 975) | |
| 976 | CTTCTCCAATGCGACGGGTGGTTTTAGA | pegRNA; contains gRNA core SEQ ID |
| | GCTAGAAATAGCAAGTTAAAATAAGGC | NO: 1854 |
| | TAGTCCGTTATCAACTTGAAAAAGTGGC | |
| | ACCGAGTCGGTGCGGGTACTCGAAGGG | |
| | GCTGCGTACCACACCCGTCGCATTGG | |
| | (SEQ ID NO: 976) | |
| 977 | CTTCTCCAATGCGACGGGTGGTTTTAGA | pegRNA; contains gRNA core SEQ ID |
| | GCTAGAAATAGCAAGTTAAAATAAGGC | NO: 1854 |
| | TAGTCCGTTATCAACTTGAAAAAGTGGC | |
| | ACCGAGTCGGTGCGTGGGTACTCGAAG | |
| | GGGCTGCGTACCACACCCGTCGCATT | |
| | (SEQ ID NO: 977) | |
| 978 | CTTCTCCAATGCGACGGGTGGTTTTAGA | pegRNA; contains gRNA core SEQ ID |
| | GCTAGAAATAGCAAGTTAAAATAAGGC | NO: 1854, and TTTT (sequence number |
| | TAGTCCGTTATCAACTTGAAAAAGTGGC | 1860) 3′ terminal sequence |
| | ACCGAGTCGGTGCGTACTCGAAGGGGC | |
| | TGCGTACCACACCCGTCGCATTGGTTTT | |
| | (SEQ ID NO: 978) | |
| 979 | CTTCTCCAATGCGACGGGTGGTTTTAGA | pegRNA; contains gRNA core SEQ ID |
| | GCTAGAAATAGCAAGTTAAAATAAGGC | NO: 1854, and TTTT (sequence number |
| | TAGTCCGTTATCAACTTGAAAAAGTGGC | 1860) 3′ terminal sequence |
| | ACCGAGTCGGTGCACTCGAAGGGGCTG | |
| | CGTACCACACCCGTCGCATTGGAGTTTT | |
| | (SEQ ID NO: 979) | |
| 980 | CTTCTCCAATGCGACGGGTGGTTTTAGA | pegRNA; contains gRNA core SEQ ID |
| | GCTAGAAATAGCAAGTTAAAATAAGGC | NO: 1854 |
| | TAGTCCGTTATCAACTTGAAAAAGTGGC | |
| | ACCGAGTCGGTGCGGGTACTCGAAGGG | |
| | GCTGCGTACCACACCCGTCGCATTGGA | |
| | G (SEQ ID NO: 980) | |
| 981 | CTTCTCCAATGCGACGGGTGGTTTTAGA | pegRNA; contains gRNA core SEQ ID |
| | GCTAGAAATAGCAAGTTAAAATAAGGC | NO: 1854 |
| | TAGTCCGTTATCAACTTGAAAAAGTGGC | |
| | ACCGAGTCGGTGCGTGGGTACTCGAAG | |
| | GGGCTGCGTACCACACCCGTCGCATTG | |
| | G (SEQ ID NO: 981) | |
| 982 | GCTTCTCCAATGCGACGGGTGGTTTAAG | pegRNA*3 (TGG-to-TCG PAM |
| | AGCGGGGAAATCCGCAAGTTTAAATAA | silencing edit); contains gRNA core |
| | GGCTAGTCCGTTATCAGCGTGAAAACG | SEQ ID NO: 1857, and transcription |
| | CGGCACCGAGTCGGTGCTCGAAGGGGC | adaptations |
| | TGCGTACGACACCCGTCGCATTGGTTTT | |
| | TTT (SEQ ID NO: 982) | |
| 983 | CTTCTCCAATGCGACGGGTGGTTTTAGA | pegRNA; contains gRNA core SEQ ID |
| | GCTAGAAATAGCAAGTTAAAATAAGGC | NO: 1854, and TTTT (sequence number |
| | TAGTCCGTTATCAACTTGAAAAAGTGGC | 1860) 3′ terminal sequence |
| | ACCGAGTCGGTGCGTACTCGAAGGGGC | |
| | TGCGTACCACACCCGTCGCATTGGAGTT | |
| | TT (SEQ ID NO: 983) | |
| 984 | CTTCTCCAATGCGACGGGTGGTTTTAGA | pegRNA; contains gRNA core SEQ ID |
| | GCTAGAAATAGCAAGTTAAAATAAGGC | NO: 1854 |
| | TAGTCCGTTATCAACTTGAAAAAGTGGC | |
| | ACCGAGTCGGTGCGTGGGTACTCGAAG | |
| | GGGCTGCGTACCACACCCGTCGCATTG | |
| | GAG (SEQ ID NO: 984) | |
| 985 | CTTCTCCAATGCGACGGGTGGTTTAAGA | pegRNA*3 (TGG-to-TCG PAM |
| | GCTATGCTGGAAACAGCATAGCAAGTT | silencing edit); contains gRNA core |
| | TAAATAAGGCTAGTCCGTTATCAACTTG | SEQ ID NO: 1858 |
| | AAAAAGTGGCACCGAGTCGGTGCTCGA | |
| | AGGGGCTGCGTACGACACCCGTCGCAT | |
| | TGG (SEQ ID NO: 985) | |
| 986 | CTTCTCCAATGCGACGGGTGGTTTAAGA | pegRNA*3 (TGG-to-TCG PAM |
| | GCTATGCTGGAAACAGCATAGCAAGTT | silencing edit); contains gRNA core |
| | TAAATAAGGCTAGTCCGTTATCAGCGTG | SEQ ID NO: 1859 |
| | AAAACGCGGCACCGAGTCGGTGCTCGA | |
| | AGGGGCTGCGTACGACACCCGTCGCAT | |
| | TGG (SEQ ID NO: 986) | |
| 987 | GCTTCTCCAATGCGACGGGTGGTTTAAG | pegRNA*3 (TGG-to-TCG PAM |
| | AGCGGGGAAATCCGCAAGTTTAAATAA | silencing edit); contains gRNA core |
| | GGCTAGTCCGTTATCAGCGTGAAAACG | SEQ ID NO: 1857, Linker [TTGGTA |
| | CGGCACCGAGTCGGTGCTCGAAGGGGC | (Sequence Number: 1746)] + Seq. Spec. |
| | TGCGTACGACACCCGTCGCATTGGTTGG | 3′ Motif [CTTCGA (Sequence Number: |
| | TACTTCGATTTTTTT (SEQ ID NO: 987) | 1818)], and transcription adaptations |
| 988 | GCTTCTCCAATGCGACGGGTGGTTTAAG | pegRNA*3 (TGG-to-TCG PAM |
| | AGCGGGGAAATCCGCAAGTTTAAATAA | silencing edit); contains gRNA core |
| | GGCTAGTCCGTTATCAGCGTGAAAACG | SEQ ID NO: 1857, Linker [TTGTGG |
| | CGGCACCGAGTCGGTGCTCGAAGGGGC | (Sequence Number: 1747)] + Seq. Spec. |
| | TGCGTACGACACCCGTCGCATTGGTTGT | 3′ Motif [CCTTCG (Sequence Number: |
| | GGCCTTCGTTTTTTT (SEQ ID NO: 988) | 1819)], and transcription adaptations |
| 989 | GCTTCTCCAATGCGACGGGTGGTTTAAG | pegRNA*3 (TGG-to-TCG PAM |
| | AGCGGGGAAATCCGCAAGTTTAAATAA | silencing edit); contains gRNA core |
| | GGCTAGTCCGTTATCAGCGTGAAAACG | SEQ ID NO: 1857, Linker [TCACTC |
| | CGGCACCGAGTCGGTGCTCGAAGGGGC | (Sequence Number: 1748)] + Seq. Spec. |
| | TGCGTACGACACCCGTCGCATTGGTCAC | 3′ Motif [CCCTTC (Sequence Number: |
| | TCCCCTTCTTTTTTT (SEQ ID NO: 989) | 1820)], and transcription adaptations |
| 990 | GCTTCTCCAATGCGACGGGTGGTTTAAG | pegRNA*3 (TGG-to-TCG PAM |
| | AGCGGGGAAATCCGCAAGTTTAAATAA | silencing edit); contains gRNA core |
| | GGCTAGTCCGTTATCAGCGTGAAAACG | SEQ ID NO: 1857, Linker [TTCTTG |
| | CGGCACCGAGTCGGTGCTCGAAGGGGC | (Sequence Number: 1749)] + Seq. Spec. |
| | TGCGTACGACACCCGTCGCATTGGTTCT | 3′ Motif [CCCCTT (Sequence Number: |
| | TGCCCCTTTTTTTTT (SEQ ID NO: 990) | 1821)], and transcription adaptations |
| 991 | GCTTCTCCAATGCGACGGGTGGTTTAAG | pegRNA*3 (TGG-to-TCG PAM |
| | AGCGGGGAAATCCGCAAGTTTAAATAA | silencing edit); contains gRNA core |
| | GGCTAGTCCGTTATCAGCGTGAAAACG | SEQ ID NO: 1857, Linker [TCTATT |
| | CGGCACCGAGTCGGTGCTCGAAGGGGC | (Sequence Number: 1750)] + Seq. Spec. |
| | TGCGTACGACACCCGTCGCATTGGTCTA | 3′ Motif [GCCCCT (Sequence Number: |
| | TTGCCCCTTTTTTTT (SEQ ID NO: 991) | 1822)], and transcription adaptations |
| 992 | GCTTCTCCAATGCGACGGGTGGTTTAAG | pegRNA*3 (TGG-to-TCG PAM |
| | AGCGGGGAAATCCGCAAGTTTAAATAA | silencing edit); contains gRNA core |
| | GGCTAGTCCGTTATCAGCGTGAAAACG | SEQ ID NO: 1857, Linker [TTAAAA |
| | CGGCACCGAGTCGGTGCTCGAAGGGGC | (Sequence Number: 1751)] + Seq. Spec. |
| | TGCGTACGACACCCGTCGCATTGGTTAA | 3′ Motif [AGCCCC (Sequence Number: |
| | AAAGCCCCTTTTTTT (SEQ ID NO: 992) | 1823)], and transcription adaptations |
| 993 | GCTTCTCCAATGCGACGGGTGGTTTAAG | pegRNA*3 (TGG-to-TCG PAM |
| | AGCGGGGAAATCCGCAAGTTTAAATAA | silencing edit); contains gRNA core |
| | GGCTAGTCCGTTATCAGCGTGAAAACG | SEQ ID NO: 1857, Linker [TTAAAA |
| | CGGCACCGAGTCGGTGCTCGAAGGGGC | (Sequence Number: 1751)] + Seq. Spec. |
| | TGCGTACGACACCCGTCGCATTGGTTAA | 3′ Motif [CAGCCC (Sequence Number: |
| | AACAGCCCTTTTTTT (SEQ ID NO: 993) | 1824)], and transcription adaptations |
| 994 | GCTTCTCCAATGCGACGGGTGGTTTAAG | pegRNA*3 (TGG-to-TCG PAM |
| | AGCGGGGAAATCCGCAAGTTTAAATAA | silencing edit); contains gRNA core |
| | GGCTAGTCCGTTATCAGCGTGAAAACG | SEQ ID NO: 1857, Linker [TAAAAA |
| | CGGCACCGAGTCGGTGCTCGAAGGGGC | (Sequence Number: 1752)] + Seq. Spec. |
| | TGCGTACGACACCCGTCGCATTGGTAA | 3′ Motif [GCAGCC (Sequence Number: |
| | AAAGCAGCCTTTTTTT (SEQ ID NO: 994) | 1825)], and transcription adaptations |
| 995 | GCTTCTCCAATGCGACGGGTGGTTTAAG | pegRNA*3 (TGG-to-TCG PAM |
| | AGCGGGGAAATCCGCAAGTTTAAATAA | silencing edit); contains gRNA core |
| | GGCTAGTCCGTTATCAGCGTGAAAACG | SEQ ID NO: 1857, Linker [CCTATC |
| | CGGCACCGAGTCGGTGCTCGAAGGGGC | (Sequence Number: 1753)] + Seq. Spec. |
| | TGCGTACGACACCCGTCGCATTGGCCTA | 3′ Motif [CGCAGC (Sequence Number: |
| | TCCGCAGCTTTTTTT (SEQ ID NO: 995) | 1826)], and transcription adaptations |
| 996 | GCTTCTCCAATGCGACGGGTGGTTTAAG | pegRNA*3 (TGG-to-TCG PAM |
| | AGCGGGGAAATCCGCAAGTTTAAATAA | silencing edit); contains gRNA core |
| | GGCTAGTCCGTTATCAGCGTGAAAACG | SEQ ID NO: 1857, Linker [CACAAT |
| | CGGCACCGAGTCGGTGCTCGAAGGGGC | (Sequence Number: 1754)] + Seq. Spec. |
| | TGCGTACGACACCCGTCGCATTGGCAC | 3′ Motif [ACGCAG (Sequence |
| | AATACGCAGTTTTTTT (SEQ ID NO: 996) | Number: 1827)], and transcription |
| | | adaptations |
| 997 | GCTTCTCCAATGCGACGGGTGGTTTAAG | pegRNA*3 (TGG-to-TCG PAM |
| | AGCGGGGAAATCCGCAAGTTTAAATAA | silencing edit); contains gRNA core |
| | GGCTAGTCCGTTATCAGCGTGAAAACG | SEQ ID NO: 1857, Linker [TAACAC |
| | CGGCACCGAGTCGGTGCTCGAAGGGGC | (Sequence Number: 1755)] + Seq. Spec. |
| | TGCGTACGACACCCGTCGCATTGGTAAC | 3′ Motif [TACGCA (Sequence Number: |
| | ACTACGCATTTTTTT (SEQ ID NO: 997) | 1828)], and transcription adaptations |
| 998 | GCTTCTCCAATGCGACGGGTGGTTTAAG | pegRNA*3 (TGG-to-TCG PAM |
| | AGCGGGGAAATCCGCAAGTTTAAATAA | silencing edit); contains gRNA core |
| | GGCTAGTCCGTTATCAGCGTGAAAACG | SEQ ID NO: 1857, Linker [TATCCT |
| | CGGCACCGAGTCGGTGCTCGAAGGGGC | (Sequence Number: 1756)] + Seq. Spec. |
| | TGCGTACGACACCCGTCGCATTGGTATC | 3′ Motif [GTACGC (Sequence Number: |
| | CTGTACGCTTTTTTT (SEQ ID NO: 998) | 1829)], and transcription adaptations |
| 999 | GCTTCTCCAATGCGACGGGTGGTTTAAG | pegRNA*3 (TGG-to-TCG PAM |
| | AGCGGGGAAATCCGCAAGTTTAAATAA | silencing edit); contains gRNA core |
| | GGCTAGTCCGTTATCAGCGTGAAAACG | SEQ ID NO: 1857, Linker [TATCCA |
| | CGGCACCGAGTCGGTGCTCGAAGGGGC | (Sequence Number: 1757)] + Seq. Spec. |
| | TGCGTACGACACCCGTCGCATTGGTATC | 3′ Motif [CGTACG (Sequence Number: |
| | CACGTACGTTTTTTT (SEQ ID NO: 999) | 1830)], and transcription adaptations |
| 1000 | GCTTCTCCAATGCGACGGGTGGTTTAAG | pegRNA*3 (TGG-to-TCG PAM |
| | AGCGGGGAAATCCGCAAGTTTAAATAA | silencing edit); contains gRNA core |
| | GGCTAGTCCGTTATCAGCGTGAAAACG | SEQ ID NO: 1857, Linker [TATGCG |
| | CGGCACCGAGTCGGTGCTCGAAGGGGC | (Sequence Number: 1758)] + Seq. Spec. |
| | TGCGTACGACACCCGTCGCATTGGTATG | 3′ Motif [TCGTAC (Sequence Number: |
| | CGTCGTACTTTTTTT (SEQ ID NO: 1000) | 1831)], and transcription adaptations |
| 1001 | GCTTCTCCAATGCGACGGGTGGTTTAAG | pegRNA*3 (TGG-to-TCG PAM |
| | AGCGGGGAAATCCGCAAGTTTAAATAA | silencing edit); contains gRNA core |
| | GGCTAGTCCGTTATCAGCGTGAAAACG | SEQ ID NO: 1857, Linker [TATCAG |
| | CGGCACCGAGTCGGTGCTCGAAGGGGC | (Sequence Number: 1759)] + Seq. Spec. |
| | TGCGTACGACACCCGTCGCATTGGTATC | 3′ Motif [GTCGTA (Sequence Number: |
| | AGGTCGTATTTTTTT (SEQ ID NO: 1001) | 1832)], and transcription adaptations |
| 1002 | GCTTCTCCAATGCGACGGGTGGTTTAAG | pegRNA*3 (TGG-to-TCG PAM |
| | AGCGGGGAAATCCGCAAGTTTAAATAA | silencing edit); contains gRNA core |
| | GGCTAGTCCGTTATCAGCGTGAAAACG | SEQ ID NO: 1857, Linker [TATATA |
| | CGGCACCGAGTCGGTGCTCGAAGGGGC | (Sequence Number: 1760)] + Seq. Spec. |
| | TGCGTACGACACCCGTCGCATTGGTATA | 3′ Motif [TGTCGT (Sequence Number: |
| | TATGTCGTTTTTTTT (SEQ ID NO: 1002) | 1833)], and transcription adaptations |
| 1003 | GCTTCTCCAATGCGACGGGTGGTTTAAG | pegRNA*3 (TGG-to-TCG PAM |
| | AGCGGGGAAATCCGCAAGTTTAAATAA | silencing edit); contains gRNA core |
| | GGCTAGTCCGTTATCAGCGTGAAAACG | SEQ ID NO: 1857, Linker [TACACT |
| | CGGCACCGAGTCGGTGCTCGAAGGGGC | (Sequence Number: 1761)] + Seq. Spec. |
| | TGCGTACGACACCCGTCGCATTGGTACA | 3′ Motif [GTGTCG (Sequence Number: |
| | CTGTGTCGTTTTTTT (SEQ ID NO: 1003) | 1834)], and transcription adaptations |
| 1004 | GCTTCTCCAATGCGACGGGTGGTTTAAG | pegRNA*3 (TGG-to-TCG PAM |
| | AGCGGGGAAATCCGCAAGTTTAAATAA | silencing edit); contains gRNA core |
| | GGCTAGTCCGTTATCAGCGTGAAAACG | SEQ ID NO: 1857, Linker [TCACTC |
| | CGGCACCGAGTCGGTGCTCGAAGGGGC | (Sequence Number: 1748)] + Seq. Spec. |
| | TGCGTACGACACCCGTCGCATTGGTCAC | 3′ Motif [CCCTTCGA (Sequence |
| | TCCCCTTCGATTTTTTT (SEQ ID NO: | Number: 1835)], and transcription |
| | 1004) | adaptations |
| 1005 | GCTTCTCCAATGCGACGGGTGGTTTAAG | pegRNA*3 (TGG-to-TCG PAM |
| | AGCGGGGAAATCCGCAAGTTTAAATAA | silencing edit); contains gRNA core |
| | GGCTAGTCCGTTATCAGCGTGAAAACG | SEQ ID NO: 1857, Linker [TTCTTG |
| | CGGCACCGAGTCGGTGCTCGAAGGGGC | (Sequence Number: 1749)] + Seq. Spec. |
| | TGCGTACGACACCCGTCGCATTGGTTCT | 3′ Motif [CCCCTTCG (Sequence |
| | TGCCCCTTCGTTTTTTT (SEQ ID NO: | Number: 1836)], and transcription |
| | 1005) | adaptations |
| 1006 | GCTTCTCCAATGCGACGGGTGGTTTAAG | pegRNA*3 (TGG-to-TCG PAM |
| | AGCGGGGAAATCCGCAAGTTTAAATAA | silencing edit); contains gRNA core |
| | GGCTAGTCCGTTATCAGCGTGAAAACG | SEQ ID NO: 1857, Linker [TCTATT |
| | CGGCACCGAGTCGGTGCTCGAAGGGGC | (Sequence Number: 1750)] + Seq. Spec. |
| | TGCGTACGACACCCGTCGCATTGGTCTA | 3′ Motif [GCCCCTTC (Sequence |
| | TTGCCCCTTCTTTTTTT (SEQ ID NO: | Number: 1837)], and transcription |
| | 1006) | adaptations |
| 1007 | GCTTCTCCAATGCGACGGGTGGTTTAAG | pegRNA*3 (TGG-to-TCG PAM |
| | AGCGGGGAAATCCGCAAGTTTAAATAA | silencing edit); contains gRNA core |
| | GGCTAGTCCGTTATCAGCGTGAAAACG | SEQ ID NO: 1857, Linker [TTCTTG |
| | CGGCACCGAGTCGGTGCTCGAAGGGGC | (Sequence Number: 1749)] + Seq. Spec. |
| | TGCGTACGACACCCGTCGCATTGGTTCT | 3′ Motif [AGCCCCTT (Sequence |
| | TGAGCCCCTTTTTTTTT (SEQ ID NO: | Number: 1838)], and transcription |
| | 1007) | adaptations |
| 1008 | GCTTCTCCAATGCGACGGGTGGTTTAAG | pegRNA*3 (TGG-to-TCG PAM |
| | AGCGGGGAAATCCGCAAGTTTAAATAA | silencing edit); contains gRNA core |
| | GGCTAGTCCGTTATCAGCGTGAAAACG | SEQ ID NO: 1857, Linker [TTAAAA |
| | CGGCACCGAGTCGGTGCTCGAAGGGGC | (Sequence Number: 1751)] + Seq. Spec. |
| | TGCGTACGACACCCGTCGCATTGGTTAA | 3′ Motif [CAGCCCCT (Sequence |
| | AACAGCCCCTTTTTTTT (SEQ ID NO: | Number: 1839)], and transcription |
| | 1008) | adaptations |
| 1009 | GCTTCTCCAATGCGACGGGTGGTTTAAG | pegRNA*3 (TGG-to-TCG PAM |
| | AGCGGGGAAATCCGCAAGTTTAAATAA | silencing edit); contains gRNA core |
| | GGCTAGTCCGTTATCAGCGTGAAAACG | SEQ ID NO: 1857, Linker [TAAAAA |
| | CGGCACCGAGTCGGTGCTCGAAGGGGC | (Sequence Number: 1752)] + Seq. Spec. |
| | TGCGTACGACACCCGTCGCATTGGTAA | 3′ Motif [GCAGCCCC (Sequence |
| | AAAGCAGCCCCTTTTTTT (SEQ ID NO: | Number: 1840)], and transcription |
| | 1009) | adaptations |
| 1010 | GCTTCTCCAATGCGACGGGTGGTTTAAG | pegRNA*3 (TGG-to-TCG PAM |
| | AGCGGGGAAATCCGCAAGTTTAAATAA | silencing edit); contains gRNA core |
| | GGCTAGTCCGTTATCAGCGTGAAAACG | SEQ ID NO: 1857, Linker [CAAATT |
| | CGGCACCGAGTCGGTGCTCGAAGGGGC | (Sequence Number: 1762)] + Seq. Spec. |
| | TGCGTACGACACCCGTCGCATTGGCAA | 3′ Motif [CGCAGCCC (Sequence |
| | ATTCGCAGCCCTTTTTTT (SEQ ID NO: | Number: 1841)], and transcription |
| | 1010) | adaptations |
| 1011 | GCTTCTCCAATGCGACGGGTGGTTTAAG | pegRNA*3 (TGG-to-TCG PAM |
| | AGCGGGGAAATCCGCAAGTTTAAATAA | silencing edit); contains gRNA core |
| | GGCTAGTCCGTTATCAGCGTGAAAACG | SEQ ID NO: 1857, Linker [CACAAT |
| | CGGCACCGAGTCGGTGCTCGAAGGGGC | (Sequence Number: 1754)] + Seq. Spec. |
| | TGCGTACGACACCCGTCGCATTGGCAC | 3′ Motif [ACGCAGCC (Sequence |
| | AATACGCAGCCTTTTTTT (SEQ ID NO: | Number: 1842)], and transcription |
| | 1011) | adaptations |
| 1012 | GCTTCTCCAATGCGACGGGTGGTTTAAG | pegRNA*3 (TGG-to-TCG PAM |
| | AGCGGGGAAATCCGCAAGTTTAAATAA | silencing edit); contains gRNA core |
| | GGCTAGTCCGTTATCAGCGTGAAAACG | SEQ ID NO: 1857, Linker [CAACAC |
| | CGGCACCGAGTCGGTGCTCGAAGGGGC | (Sequence Number: 1718)] + Seq. Spec. |
| | TGCGTACGACACCCGTCGCATTGGCAA | 3′ Motif [TACGCAGC (Sequence |
| | CACTACGCAGCTTTTTTT (SEQ ID NO: | Number: 1843)], and transcription |
| | 1012) | adaptations |
| 1013 | GCTTCTCCAATGCGACGGGTGGTTTAAG | pegRNA*3 (TGG-to-TCG PAM |
| | AGCGGGGAAATCCGCAAGTTTAAATAA | silencing edit); contains gRNA core |
| | GGCTAGTCCGTTATCAGCGTGAAAACG | SEQ ID NO: 1857, Linker [CCCCCA |
| | CGGCACCGAGTCGGTGCTCGAAGGGGC | (Sequence Number: 1763)] + Seq. Spec. |
| | TGCGTACGACACCCGTCGCATTGGCCCC | 3′ Motif [GTACGCAG (Sequence |
| | CAGTACGCAGTTTTTTT (SEQ ID NO: | Number: 1844)], and transcription |
| | 1013) | adaptations |
| 1014 | GCTTCTCCAATGCGACGGGTGGTTTAAG | pegRNA*3 (TGG-to-TCG PAM |
| | AGCGGGGAAATCCGCAAGTTTAAATAA | silencing edit); contains gRNA core |
| | GGCTAGTCCGTTATCAGCGTGAAAACG | SEQ ID NO: 1857, Linker [TCTCCC |
| | CGGCACCGAGTCGGTGCTCGAAGGGGC | (Sequence Number: 1764)] + Seq. Spec. |
| | TGCGTACGACACCCGTCGCATTGGTCTC | 3′ Motif [CGTACGCA (Sequence |
| | CCCGTACGCATTTTTTT (SEQ ID NO: | Number: 1845)], and transcription |
| | 1014) | adaptations |
| 1015 | GCTTCTCCAATGCGACGGGTGGTTTAAG | pegRNA*3 (TGG-to-TCG PAM |
| | AGCGGGGAAATCCGCAAGTTTAAATAA | silencing edit); contains gRNA core |
| | GGCTAGTCCGTTATCAGCGTGAAAACG | SEQ ID NO: 1857, Linker [TTCTCC |
| | CGGCACCGAGTCGGTGCTCGAAGGGGC | (Sequence Number: 1765)] + Seq. Spec. |
| | TGCGTACGACACCCGTCGCATTGGTTCT | 3′ Motif [TCGTACGC (Sequence |
| | CCTCGTACGCTTTTTTT (SEQ ID NO: | Number: 1846)], and transcription |
| | 1015) | adaptations |
| 1016 | GCTTCTCCAATGCGACGGGTGGTTTAAG | pegRNA*3 (TGG-to-TCG PAM |
| | AGCGGGGAAATCCGCAAGTTTAAATAA | silencing edit); contains gRNA core |
| | GGCTAGTCCGTTATCAGCGTGAAAACG | SEQ ID NO: 1857, Linker [TCACCA |
| | CGGCACCGAGTCGGTGCTCGAAGGGGC | (Sequence Number: 1766)] + Seq. Spec. |
| | TGCGTACGACACCCGTCGCATTGGTCAC | 3′ Motif [GTCGTACG (Sequence |
| | CAGTCGTACGTTTTTTT (SEQ ID NO: | Number: 1847)], and transcription |
| | 1016) | adaptations |
| 1017 | GCTTCTCCAATGCGACGGGTGGTTTAAG | pegRNA*3 (TGG-to-TCG PAM |
| | AGCGGGGAAATCCGCAAGTTTAAATAA | silencing edit); contains gRNA core |
| | GGCTAGTCCGTTATCAGCGTGAAAACG | SEQ ID NO: 1857, Linker [TATCCA |
| | CGGCACCGAGTCGGTGCTCGAAGGGGC | (Sequence Number: 1757)] + Seq. Spec. |
| | TGCGTACGACACCCGTCGCATTGGTATC | 3′ Motif [TGTCGTAC (Sequence |
| | CATGTCGTACTTTTTTT (SEQ ID NO: | Number: 1848)], and transcription |
| | 1017) | adaptations |
| 1018 | GCTTCTCCAATGCGACGGGTGGTTTAAG | pegRNA*3 (TGG-to-TCG PAM |
| | AGCGGGGAAATCCGCAAGTTTAAATAA | silencing edit); contains gRNA core |
| | GGCTAGTCCGTTATCAGCGTGAAAACG | SEQ ID NO: 1857, Linker [TCAGCA |
| | CGGCACCGAGTCGGTGCTCGAAGGGGC | (Sequence Number: 1767)] + Seq. Spec. |
| | TGCGTACGACACCCGTCGCATTGGTCAG | 3′ Motif [GTGTCGTA (Sequence |
| | CAGTGTCGTATTTTTTT (SEQ ID NO: | Number: 1849)], and transcription |
| | 1018) | adaptations |
| 1019 | CTTCTCCAATGCGACGGGTGGTTTTAGA | pegRNA; contains gRNA core SEQ ID |
| | GCTAGAAATAGCAAGTTAAAATAAGGC | NO: 1854, and Linker [AACATTGA |
| | TAGTCCGTTATCAACTTGAAAAAGTGGC | (Sequence Number: 1728)] + Univ. 3′ |
| | ACCGAGTCGGTGCGAAGGGGCTGCGTA | Motif |
| | CCACACCCGTCGCAAACATTGACGCGT | [CGCGTCTCTACGTGGGGGCGCG |
| | CTCTACGTGGGGGCGCG (SEQ ID NO: | (Sequence Number: 1850)] |
| | 1019) | |
| 1020 | CTTCTCCAATGCGACGGGTGGTTTTAGA | pegRNA*3 (TGG-to-TCG PAM |
| | GCTAGAAATAGCAAGTTAAAATAAGGC | silencing edit); contains gRNA core |
| | TAGTCCGTTATCAACTTGAAAAAGTGGC | SEQ ID NO: 1854, and Linker |
| | ACCGAGTCGGTGCGAAGGGGCTGCGTA | [AACATTGA (Sequence Number: |
| | CGACACCCGTCGCAAACATTGACGCGT | 1728)] + Univ. 3′ Motif |
| | CTCTACGTGGGGGCGCG (SEQ ID NO: | [CGCGTCTCTACGTGGGGGCGCG |
| | 1020) | (Sequence Number: 1850)] |
| 1021 | CTTCTCCAATGCGACGGGTGGTTTTAGA | pegRNA*1 (TGG-to-TAG PAM |
| | GCTAGAAATAGCAAGTTAAAATAAGGC | silencing edit); contains gRNA core |
| | TAGTCCGTTATCAACTTGAAAAAGTGGC | SEQ ID NO: 1854, and Linker |
| | ACCGAGTCGGTGCGAAGGGGCTGCGTA | [AACATTGA (Sequence Number: |
| | CTACACCCGTCGCAAACATTGACGCGTC | 1728)] + Univ. 3′ Motif |
| | TCTACGTGGGGGCGCG (SEQ ID NO: | [CGCGTCTCTACGTGGGGGCGCG |
| | 1021) | (Sequence Number: 1850)] |
| 1022 | CTTCTCCAATGCGACGGGTGGTTTTAGA | pegRNA*2 (TGG-to-TTG PAM |
| | GCTAGAAATAGCAAGTTAAAATAAGGC | silencing edit); contains gRNA core |
| | TAGTCCGTTATCAACTTGAAAAAGTGGC | SEQ ID NO: 1854, and Linker |
| | ACCGAGTCGGTGCGAAGGGGCTGCGTA | [AACATTGA (Sequence Number: |
| | CAACACCCGTCGCAAACATTGACGCGT | 1728)] + Univ. 3′ Motif |
| | CTCTACGTGGGGGCGCG (SEQ ID NO: | [CGCGTCTCTACGTGGGGGCGCG |
| | 1022) | (Sequence Number: 1850)] |
| 1023 | CTTCTCCAATGCGACGGGTGGTTTTAGA | pegRNA*3 (TGG-to-TCG PAM |
| | GCTAGAAATAGCAAGTTAAAATAAGGC | silencing edit); contains gRNA core |
| | TAGTCCGTTATCAACTTGAAAAAGTGGC | SEQ ID NO: 1854, and Linker |
| | ACCGAGTCGGTGCGAAGGGGCTGCGTA | [AACATTGA (Sequence Number: |
| | CGACACCCGTCGCATAACATTGACGCG | 1728)] + Univ. 3′ Motif |
| | TCTCTACGTGGGGGCGCG (SEQ ID NO: | [CGCGTCTCTACGTGGGGGCGCG |
| | 1023) | (Sequence Number: 1850)] |
| 1024 | CTTCTCCAATGCGACGGGTGGTTTTAGA | pegRNA*3 (TGG-to-TCG PAM |
| | GCTAGAAATAGCAAGTTAAAATAAGGC | silencing edit); contains gRNA core |
| | TAGTCCGTTATCAACTTGAAAAAGTGGC | SEQ ID NO: 1854, and Linker |
| | ACCGAGTCGGTGCTCGAAGGGGCTGCG | [AACATTGA (Sequence Number: |
| | TACGACACCCGTCGCAACATTGACGCG | 1728)] + Univ. 3′ Motif |
| | TCTCTACGTGGGGGCGCG (SEQ ID NO: | [CGCGTCTCTACGTGGGGGCGCG |
| | 1024) | (Sequence Number: 1850)] |
| 1025 | CTTCTCCAATGCGACGGGTGGTTTTAGA | pegRNA*1 (TGG-to-TAG PAM |
| | GCTAGAAATAGCAAGTTAAAATAAGGC | silencing edit); contains gRNA core |
| | TAGTCCGTTATCAACTTGAAAAAGTGGC | SEQ ID NO: 1854, and Linker |
| | ACCGAGTCGGTGCGAAGGGGCTGCGTA | [AACATTGA (Sequence Number: |
| | CTACACCCGTCGCATAACATTGACGCGT | 1728)] + Univ. 3′ Motif |
| | CTCTACGTGGGGGCGCG (SEQ ID NO: | [CGCGTCTCTACGTGGGGGCGCG |
| | 1025) | (Sequence Number: 1850)] |
| 1026 | CTTCTCCAATGCGACGGGTGGTTTTAGA | pegRNA*1 (TGG-to-TAG PAM |
| | GCTAGAAATAGCAAGTTAAAATAAGGC | silencing edit); contains gRNA core |
| | TAGTCCGTTATCAACTTGAAAAAGTGGC | SEQ ID NO: 1854, and Linker |
| | ACCGAGTCGGTGCTCGAAGGGGCTGCG | [AACATTGA (Sequence Number: |
| | TACTACACCCGTCGCAACATTGACGCGT | 1728)] + Univ. 3′ Motif |
| | CTCTACGTGGGGGCGCG (SEQ ID NO: | [CGCGTCTCTACGTGGGGGCGCG |
| | 1026) | (Sequence Number: 1850)] |
| 1027 | CTTCTCCAATGCGACGGGTGGTTTTAGA | pegRNA; contains gRNA core SEQ ID |
| | GCTAGAAATAGCAAGTTAAAATAAGGC | NO: 1854, and Linker [AACATTGA |
| | TAGTCCGTTATCAACTTGAAAAAGTGGC | (Sequence Number: 1728)] + Univ. 3′ |
| | ACCGAGTCGGTGCGAAGGGGCTGCGTA | Motif |
| | CCACACCCGTCGCATAACATTGACGCGT | [CGCGTCTCTACGTGGGGGCGCG |
| | CTCTACGTGGGGGCGCG (SEQ ID NO: | (Sequence Number: 1850)] |
| | 1027) | |
| 1028 | CTTCTCCAATGCGACGGGTGGTTTTAGA | pegRNA; contains gRNA core SEQ ID |
| | GCTAGAAATAGCAAGTTAAAATAAGGC | NO: 1854, and Linker [AACATTGA |
| | TAGTCCGTTATCAACTTGAAAAAGTGGC | (Sequence Number: 1728)] + Univ. 3′ |
| | ACCGAGTCGGTGCTCGAAGGGGCTGCG | Motif |
| | TACCACACCCGTCGCAACATTGACGCGT | [CGCGTCTCTACGTGGGGGCGCG |
| | CTCTACGTGGGGGCGCG (SEQ ID NO: | (Sequence Number: 1850)] |
| | 1028) | |
| 1029 | CTTCTCCAATGCGACGGGTGGTTTTAGA | pegRNA*2 (TGG-to-TTG PAM |
| | GCTAGAAATAGCAAGTTAAAATAAGGC | silencing edit); contains gRNA core |
| | TAGTCCGTTATCAACTTGAAAAAGTGGC | SEQ ID NO: 1854, and Linker |
| | ACCGAGTCGGTGCGAAGGGGCTGCGTA | [AACATTGA (Sequence Number: |
| | CAACACCCGTCGCATAACATTGACGCG | 1728)] + Univ. 3′ Motif |
| | TCTCTACGTGGGGGCGCG (SEQ ID NO: | [CGCGTCTCTACGTGGGGGCGCG |
| | 1029) | (Sequence Number: 1850)] |
| 1030 | CTTCTCCAATGCGACGGGTGGTTTTAGA | pegRNA*2 (TGG-to-TTG PAM |
| | GCTAGAAATAGCAAGTTAAAATAAGGC | silencing edit); contains gRNA core |
| | TAGTCCGTTATCAACTTGAAAAAGTGGC | SEQ ID NO: 1854, and Linker |
| | ACCGAGTCGGTGCTCGAAGGGGCTGCG | [AACATTGA (Sequence Number: |
| | TACAACACCCGTCGCAACATTGACGCG | 1728)] + Univ. 3′ Motif |
| | TCTCTACGTGGGGGCGCG (SEQ ID NO: | [CGCGTCTCTACGTGGGGGCGCG |
| | 1030) | (Sequence Number: 1850)] |
| 1031 | CTTCTCCAATGCGACGGGTGGTTTTAGA | pegRNA; contains gRNA core SEQ ID |
| | GCTAGAAATAGCAAGTTAAAATAAGGC | NO: 1854, and Linker [AACATTGA |
| | TAGTCCGTTATCAACTTGAAAAAGTGGC | (Sequence Number: 1728)] + Univ. 3′ |
| | ACCGAGTCGGTGCGAAGGGGCTGCGTA | Motif |
| | CCACACCCGTCGCATTAACATTGACGCG | [CGCGTCTCTACGTGGGGGCGCG |
| | TCTCTACGTGGGGGCGCG (SEQ ID NO: | (Sequence Number: 1850)] |
| | 1031) | |
| 1032 | CTTCTCCAATGCGACGGGTGGTTTTAGA | pegRNA; contains gRNA core SEQ ID |
| | GCTAGAAATAGCAAGTTAAAATAAGGC | NO: 1854, and Linker [AACATTGA |
| | TAGTCCGTTATCAACTTGAAAAAGTGGC | (Sequence Number: 1728)] + Univ. 3′ |
| | ACCGAGTCGGTGCTCGAAGGGGCTGCG | Motif |
| | TACCACACCCGTCGCAAACATTGACGC | [CGCGTCTCTACGTGGGGGCGCG |
| | GTCTCTACGTGGGGGCGCG (SEQ ID NO: | (Sequence Number: 1850)] |
| | 1032) | |
| 1033 | CTTCTCCAATGCGACGGGTGGTTTTAGA | pegRNA*3 (TGG-to-TCG PAM |
| | GCTAGAAATAGCAAGTTAAAATAAGGC | silencing edit); contains gRNA core |
| | TAGTCCGTTATCAACTTGAAAAAGTGGC | SEQ ID NO: 1854, and Linker |
| | ACCGAGTCGGTGCGAAGGGGCTGCGTA | [AACATTGA (Sequence Number: |
| | CGACACCCGTCGCATTAACATTGACGC | 1728)] + Univ. 3′ Motif |
| | GTCTCTACGTGGGGGCGCG (SEQ ID NO: | [CGCGTCTCTACGTGGGGGCGCG |
| | 1033) | (Sequence Number: 1850)] |
| 1034 | CTTCTCCAATGCGACGGGTGGTTTTAGA | pegRNA*3 (TGG-to-TCG PAM |
| | GCTAGAAATAGCAAGTTAAAATAAGGC | silencing edit); contains gRNA core |
| | TAGTCCGTTATCAACTTGAAAAAGTGGC | SEQ ID NO: 1854, and Linker |
| | ACCGAGTCGGTGCTCGAAGGGGCTGCG | [AACATTGA (Sequence Number: |
| | TACGACACCCGTCGCAAACATTGACGC | 1728)] + Univ. 3′ Motif |
| | GTCTCTACGTGGGGGCGCG (SEQ ID NO: | [CGCGTCTCTACGTGGGGGCGCG |
| | 1034) | (Sequence Number: 1850)] |
| 1035 | CTTCTCCAATGCGACGGGTGGTTTTAGA | pegRNA*1 (TGG-to-TAG PAM |
| | GCTAGAAATAGCAAGTTAAAATAAGGC | silencing edit); contains gRNA core |
| | TAGTCCGTTATCAACTTGAAAAAGTGGC | SEQ ID NO: 1854, and Linker |
| | ACCGAGTCGGTGCGAAGGGGCTGCGTA | [AACATTGA (Sequence Number: |
| | CTACACCCGTCGCATTAACATTGACGCG | 1728)] + Univ. 3′ Motif |
| | TCTCTACGTGGGGGCGCG (SEQ ID NO: | [CGCGTCTCTACGTGGGGGCGCG |
| | 1035) | (Sequence Number: 1850)] |
| 1036 | CTTCTCCAATGCGACGGGTGGTTTTAGA | pegRNA*1 (TGG-to-TAG PAM |
| | GCTAGAAATAGCAAGTTAAAATAAGGC | silencing edit); contains gRNA core |
| | TAGTCCGTTATCAACTTGAAAAAGTGGC | SEQ ID NO: 1854, and Linker |
| | ACCGAGTCGGTGCTCGAAGGGGCTGCG | [AACATTGA (Sequence Number: |
| | TACTACACCCGTCGCAAACATTGACGC | 1728)] + Univ. 3′ Motif |
| | GTCTCTACGTGGGGGCGCG (SEQ ID NO: | [CGCGTCTCTACGTGGGGGCGCG |
| | 1036) | (Sequence Number: 1850)] |
| 1037 | CTTCTCCAATGCGACGGGTGGTTTTAGA | pegRNA*2 (TGG-to-TTG PAM |
| | GCTAGAAATAGCAAGTTAAAATAAGGC | silencing edit); contains gRNA core |
| | TAGTCCGTTATCAACTTGAAAAAGTGGC | SEQ ID NO: 1854, and Linker |
| | ACCGAGTCGGTGCGAAGGGGCTGCGTA | [AACATTGA (Sequence Number: |
| | CAACACCCGTCGCATTAACATTGACGC | 1728)] + Univ. 3′ Motif |
| | GTCTCTACGTGGGGGCGCG (SEQ ID NO: | [CGCGTCTCTACGTGGGGGCGCG |
| | 1037) | (Sequence Number: 1850)] |
| 1038 | CTTCTCCAATGCGACGGGTGGTTTTAGA | pegRNA*2 (TGG-to-TTG PAM |
| | GCTAGAAATAGCAAGTTAAAATAAGGC | silencing edit); contains gRNA core |
| | TAGTCCGTTATCAACTTGAAAAAGTGGC | SEQ ID NO: 1854, and Linker |
| | ACCGAGTCGGTGCTCGAAGGGGCTGCG | [AACATTGA (Sequence Number: |
| | TACAACACCCGTCGCAAACATTGACGC | 1728)] + Univ. 3′ Motif |
| | GTCTCTACGTGGGGGCGCG (SEQ ID NO: | [CGCGTCTCTACGTGGGGGCGCG |
| | 1038) | (Sequence Number: 1850)] |
| 1039 | CTTCTCCAATGCGACGGGTGGTTTTAGA | pegRNA*3 (TGG-to-TCG PAM |
| | GCTAGAAATAGCAAGTTAAAATAAGGC | silencing edit); contains gRNA core |
| | TAGTCCGTTATCAACTTGAAAAAGTGGC | SEQ ID NO: 1854, and Linker |
| | ACCGAGTCGGTGCGAAGGGGCTGCGTA | [AACATTGA (Sequence Number: |
| | CGACACCCGTCGCATTGAACATTGACG | 1728)] + Univ. 3′ Motif |
| | CGTCTCTACGTGGGGGCGCG (SEQ ID | [CGCGTCTCTACGTGGGGGCGCG |
| | NO: 1039) | (Sequence Number: 1850)] |
| 1040 | CTTCTCCAATGCGACGGGTGGTTTTAGA | pegRNA*3 (TGG-to-TCG PAM |
| | GCTAGAAATAGCAAGTTAAAATAAGGC | silencing edit); contains gRNA core |
| | TAGTCCGTTATCAACTTGAAAAAGTGGC | SEQ ID NO: 1854, and Linker |
| | ACCGAGTCGGTGCTCGAAGGGGCTGCG | [AACATTGA (Sequence Number: |
| | TACGACACCCGTCGCATAACATTGACG | 1728)] + Univ. 3′ Motif |
| | CGTCTCTACGTGGGGGCGCG (SEQ ID | [CGCGTCTCTACGTGGGGGCGCG |
| | NO: 1040) | (Sequence Number: 1850)] |
| 1041 | CTTCTCCAATGCGACGGGTGGTTTTAGA | pegRNA*1 (TGG-to-TAG PAM |
| | GCTAGAAATAGCAAGTTAAAATAAGGC | silencing edit); contains gRNA core |
| | TAGTCCGTTATCAACTTGAAAAAGTGGC | SEQ ID NO: 1854, and Linker |
| | ACCGAGTCGGTGCGAAGGGGCTGCGTA | [AACATTGA (Sequence Number: |
| | CTACACCCGTCGCATTGAACATTGACGC | 1728)] + Univ. 3′ Motif |
| | GTCTCTACGTGGGGGCGCG (SEQ ID NO: | [CGCGTCTCTACGTGGGGGCGCG |
| | 1041) | (Sequence Number: 1850)] |
| 1042 | CTTCTCCAATGCGACGGGTGGTTTTAGA | pegRNA*1 (TGG-to-TAG PAM |
| | GCTAGAAATAGCAAGTTAAAATAAGGC | silencing edit); contains gRNA core |
| | TAGTCCGTTATCAACTTGAAAAAGTGGC | SEQ ID NO: 1854, and Linker |
| | ACCGAGTCGGTGCTCGAAGGGGCTGCG | [AACATTGA (Sequence Number: |
| | TACTACACCCGTCGCATAACATTGACGC | 1728)] + Univ. 3′ Motif |
| | GTCTCTACGTGGGGGCGCG (SEQ ID NO: | [CGCGTCTCTACGTGGGGGCGCG |
| | 1042) | (Sequence Number: 1850)] |
| 1043 | CTTCTCCAATGCGACGGGTGGTTTTAGA | pegRNA; contains gRNA core SEQ ID |
| | GCTAGAAATAGCAAGTTAAAATAAGGC | NO: 1854, and Linker [AACATTGA |
| | TAGTCCGTTATCAACTTGAAAAAGTGGC | (Sequence Number: 1728)] + Univ. 3′ |
| | ACCGAGTCGGTGCGAAGGGGCTGCGTA | Motif |
| | CCACACCCGTCGCATTGAACATTGACGC | [CGCGTCTCTACGTGGGGGCGCG |
| | GTCTCTACGTGGGGGCGCG (SEQ ID NO: | (Sequence Number: 1850)] |
| | 1043) | |
| 1044 | CTTCTCCAATGCGACGGGTGGTTTTAGA | pegRNA; contains gRNA core SEQ ID |
| | GCTAGAAATAGCAAGTTAAAATAAGGC | NO: 1854, and Linker [AACATTGA |
| | TAGTCCGTTATCAACTTGAAAAAGTGGC | (Sequence Number: 1728)] + Univ. 3′ |
| | ACCGAGTCGGTGCTCGAAGGGGCTGCG | Motif |
| | TACCACACCCGTCGCATAACATTGACGC | [CGCGTCTCTACGTGGGGGCGCG |
| | GTCTCTACGTGGGGGCGCG (SEQ ID NO: | (Sequence Number: 1850)] |
| | 1044) | |
| 1045 | CTTCTCCAATGCGACGGGTGGTTTTAGA | pegRNA*2 (TGG-to-TTG PAM |
| | GCTAGAAATAGCAAGTTAAAATAAGGC | silencing edit); contains gRNA core |
| | TAGTCCGTTATCAACTTGAAAAAGTGGC | SEQ ID NO: 1854, and Linker |
| | ACCGAGTCGGTGCGAAGGGGCTGCGTA | [AACATTGA (Sequence Number: |
| | CAACACCCGTCGCATTGAACATTGACG | 1728)] + Univ. 3′ Motif |
| | CGTCTCTACGTGGGGGCGCG (SEQ ID | [CGCGTCTCTACGTGGGGGCGCG |
| | NO: 1045) | (Sequence Number: 1850)] |
| 1046 | CTTCTCCAATGCGACGGGTGGTTTTAGA | pegRNA*2 (TGG-to-TTG PAM |
| | GCTAGAAATAGCAAGTTAAAATAAGGC | silencing edit); contains gRNA core |
| | TAGTCCGTTATCAACTTGAAAAAGTGGC | SEQ ID NO: 1854, and Linker |
| | ACCGAGTCGGTGCTCGAAGGGGCTGCG | [AACATTGA (Sequence Number: |
| | TACAACACCCGTCGCATAACATTGACG | 1728)] + Univ. 3′ Motif |
| | CGTCTCTACGTGGGGGCGCG (SEQ ID | [CGCGTCTCTACGTGGGGGCGCG |
| | NO: 1046) | (Sequence Number: 1850)] |
| 1047 | CTTCTCCAATGCGACGGGTGGTTTTAGA | pegRNA; contains gRNA core SEQ ID |
| | GCTAGAAATAGCAAGTTAAAATAAGGC | NO: 1854, and Linker [AACATTGA |
| | TAGTCCGTTATCAACTTGAAAAAGTGGC | (Sequence Number: 1728)] + Univ. 3′ |
| | ACCGAGTCGGTGCGAAGGGGCTGCGTA | Motif |
| | CCACACCCGTCGCATTGGAACATTGAC | [CGCGTCTCTACGTGGGGGCGCG |
| | GCGTCTCTACGTGGGGGCGCG (SEQ ID | (Sequence Number: 1850)] |
| | NO: 1047) | |
| 1048 | CTTCTCCAATGCGACGGGTGGTTTTAGA | pegRNA; contains gRNA core SEQ ID |
| | GCTAGAAATAGCAAGTTAAAATAAGGC | NO: 1854, and Linker [AACATTGA |
| | TAGTCCGTTATCAACTTGAAAAAGTGGC | (Sequence Number: 1728)] + Univ. 3′ |
| | ACCGAGTCGGTGCTCGAAGGGGCTGCG | Motif |
| | TACCACACCCGTCGCATTAACATTGACG | [CGCGTCTCTACGTGGGGGCGCG |
| | CGTCTCTACGTGGGGGCGCG (SEQ ID | (Sequence Number: 1850)] |
| | NO: 1048) | |
| 1049 | CTTCTCCAATGCGACGGGTGGTTTTAGA | pegRNA; contains gRNA core SEQ ID |
| | GCTAGAAATAGCAAGTTAAAATAAGGC | NO: 1854, and Linker [AACATTGA |
| | TAGTCCGTTATCAACTTGAAAAAGTGGC | (Sequence Number: 1728)] + Univ. 3′ |
| | ACCGAGTCGGTGCACTCGAAGGGGCTG | Motif |
| | CGTACCACACCCGTCGCAAACATTGAC | [CGCGTCTCTACGTGGGGGCGCG |
| | GCGTCTCTACGTGGGGGCGCG (SEQ ID | (Sequence Number: 1850)] |
| | NO: 1049) | |
| 1050 | CTTCTCCAATGCGACGGGTGGTTTTAGA | pegRNA*3 (TGG-to-TCG PAM |
| | GCTAGAAATAGCAAGTTAAAATAAGGC | silencing edit); contains gRNA core |
| | TAGTCCGTTATCAACTTGAAAAAGTGGC | SEQ ID NO: 1854, and Linker |
| | ACCGAGTCGGTGCGAAGGGGCTGCGTA | [AACATTGA (Sequence Number: |
| | CGACACCCGTCGCATTGGAACATTGAC | 1728)] + Univ. 3′ Motif |
| | GCGTCTCTACGTGGGGGCGCG (SEQ ID | [CGCGTCTCTACGTGGGGGCGCG |
| | NO: 1050) | (Sequence Number: 1850)] |
| 1051 | CTTCTCCAATGCGACGGGTGGTTTTAGA | pegRNA*3 (TGG-to-TCG PAM |
| | GCTAGAAATAGCAAGTTAAAATAAGGC | silencing edit); contains gRNA core |
| | TAGTCCGTTATCAACTTGAAAAAGTGGC | SEQ ID NO: 1854, and Linker |
| | ACCGAGTCGGTGCTCGAAGGGGCTGCG | [AACATTGA (Sequence Number: |
| | TACGACACCCGTCGCATTAACATTGACG | 1728)] + Univ. 3′ Motif |
| | CGTCTCTACGTGGGGGCGCG (SEQ ID | [CGCGTCTCTACGTGGGGGCGCG |
| | NO: 1051) | (Sequence Number: 1850)] |
| 1052 | CTTCTCCAATGCGACGGGTGGTTTTAGA | pegRNA*1 (TGG-to-TAG PAM |
| | GCTAGAAATAGCAAGTTAAAATAAGGC | silencing edit); contains gRNA core |
| | TAGTCCGTTATCAACTTGAAAAAGTGGC | SEQ ID NO: 1854, and Linker |
| | ACCGAGTCGGTGCGAAGGGGCTGCGTA | [AACATTGA (Sequence Number: |
| | CTACACCCGTCGCATTGGAACATTGACG | 1728)] + Univ. 3′ Motif |
| | CGTCTCTACGTGGGGGCGCG (SEQ ID | [CGCGTCTCTACGTGGGGGCGCG |
| | NO: 1052) | (Sequence Number: 1850)] |
| 1053 | CTTCTCCAATGCGACGGGTGGTTTTAGA | pegRNA*1 (TGG-to-TAG PAM |
| | GCTAGAAATAGCAAGTTAAAATAAGGC | silencing edit); contains gRNA core |
| | TAGTCCGTTATCAACTTGAAAAAGTGGC | SEQ ID NO: 1854, and Linker |
| | ACCGAGTCGGTGCTCGAAGGGGCTGCG | [AACATTGA (Sequence Number: |
| | TACTACACCCGTCGCATTAACATTGACG | 1728)] + Univ. 3′ Motif |
| | CGTCTCTACGTGGGGGCGCG (SEQ ID | [CGCGTCTCTACGTGGGGGCGCG |
| | NO: 1053) | (Sequence Number: 1850)] |
| 1054 | CTTCTCCAATGCGACGGGTGGTTTTAGA | pegRNA*2 (TGG-to-TTG PAM |
| | GCTAGAAATAGCAAGTTAAAATAAGGC | silencing edit); contains gRNA core |
| | TAGTCCGTTATCAACTTGAAAAAGTGGC | SEQ ID NO: 1854, and Linker |
| | ACCGAGTCGGTGCGAAGGGGCTGCGTA | [AACATTGA (Sequence Number: |
| | CAACACCCGTCGCATTGGAACATTGAC | 1728)] + Univ. 3′ Motif |
| | GCGTCTCTACGTGGGGGCGCG (SEQ ID | [CGCGTCTCTACGTGGGGGCGCG |
| | NO: 1054) | (Sequence Number: 1850)] |
| 1055 | CTTCTCCAATGCGACGGGTGGTTTTAGA | pegRNA*2 (TGG-to-TTG PAM |
| | GCTAGAAATAGCAAGTTAAAATAAGGC | silencing edit); contains gRNA core |
| | TAGTCCGTTATCAACTTGAAAAAGTGGC | SEQ ID NO: 1854, and Linker |
| | ACCGAGTCGGTGCTCGAAGGGGCTGCG | [AACATTGA (Sequence Number: |
| | TACAACACCCGTCGCATTAACATTGACG | 1728)] + Univ. 3′ Motif |
| | CGTCTCTACGTGGGGGCGCG (SEQ ID | [CGCGTCTCTACGTGGGGGCGCG |
| | NO: 1055) | (Sequence Number: 1850)] |
| 1056 | CTTCTCCAATGCGACGGGTGGTTTTAGA | pegRNA*3 (TGG-to-TCG PAM |
| | GCTAGAAATAGCAAGTTAAAATAAGGC | silencing edit); contains gRNA core |
| | TAGTCCGTTATCAACTTGAAAAAGTGGC | SEQ ID NO: 1854, and Linker |
| | ACCGAGTCGGTGCGAAGGGGCTGCGTA | [AACATTGA (Sequence Number: |
| | CGACACCCGTCGCATTGGAAACATTGA | 1728)] + Univ. 3′ Motif |
| | CGCGTCTCTACGTGGGGGCGCG (SEQ ID | [CGCGTCTCTACGTGGGGGCGCG |
| | NO: 1056) | (Sequence Number: 1850)] |
| 1057 | CTTCTCCAATGCGACGGGTGGTTTTAGA | pegRNA*3 (TGG-to-TCG PAM |
| | GCTAGAAATAGCAAGTTAAAATAAGGC | silencing edit); contains gRNA core |
| | TAGTCCGTTATCAACTTGAAAAAGTGGC | SEQ ID NO: 1854, and Linker |
| | ACCGAGTCGGTGCTCGAAGGGGCTGCG | [AACATTGA (Sequence Number: |
| | TACGACACCCGTCGCATTGAACATTGAC | 1728)] + Univ. 3′ Motif |
| | GCGTCTCTACGTGGGGGCGCG (SEQ ID | [CGCGTCTCTACGTGGGGGCGCG |
| | NO: 1057) | (Sequence Number: 1850)] |
| 1058 | CTTCTCCAATGCGACGGGTGGTTTTAGA | pegRNA*1 (TGG-to-TAG PAM |
| | GCTAGAAATAGCAAGTTAAAATAAGGC | silencing edit); contains gRNA core |
| | TAGTCCGTTATCAACTTGAAAAAGTGGC | SEQ ID NO: 1854, and Linker |
| | ACCGAGTCGGTGCGAAGGGGCTGCGTA | [AACATTGA (Sequence Number: |
| | CTACACCCGTCGCATTGGAAACATTGAC | 1728)] + Univ. 3′ Motif |
| | GCGTCTCTACGTGGGGGCGCG (SEQ ID | [CGCGTCTCTACGTGGGGGCGCG |
| | NO: 1058) | (Sequence Number: 1850)] |
| 1059 | CTTCTCCAATGCGACGGGTGGTTTTAGA | pegRNA*1 (TGG-to-TAG PAM |
| | GCTAGAAATAGCAAGTTAAAATAAGGC | silencing edit); contains gRNA core |
| | TAGTCCGTTATCAACTTGAAAAAGTGGC | SEQ ID NO: 1854, and Linker |
| | ACCGAGTCGGTGCTCGAAGGGGCTGCG | [AACATTGA (Sequence Number: |
| | TACTACACCCGTCGCATTGAACATTGAC | 1728)] + Univ. 3′ Motif |
| | GCGTCTCTACGTGGGGGCGCG (SEQ ID | [CGCGTCTCTACGTGGGGGCGCG |
| | NO: 1059) | (Sequence Number: 1850)] |
| 1060 | CTTCTCCAATGCGACGGGTGGTTTTAGA | pegRNA; contains gRNA core SEQ ID |
| | GCTAGAAATAGCAAGTTAAAATAAGGC | NO: 1854, and Linker [AACATTGA |
| | TAGTCCGTTATCAACTTGAAAAAGTGGC | (Sequence Number: 1728)] + Univ. 3′ |
| | ACCGAGTCGGTGCGAAGGGGCTGCGTA | Motif |
| | CCACACCCGTCGCATTGGAAACATTGA | [CGCGTCTCTACGTGGGGGCGCG |
| | CGCGTCTCTACGTGGGGGCGCG (SEQ ID | (Sequence Number: 1850)] |
| | NO: 1060) | |
| 1061 | CTTCTCCAATGCGACGGGTGGTTTTAGA | pegRNA; contains gRNA core SEQ ID |
| | GCTAGAAATAGCAAGTTAAAATAAGGC | NO: 1854, and Linker [AACATTGA |
| | TAGTCCGTTATCAACTTGAAAAAGTGGC | (Sequence Number: 1728)] + Univ. 3′ |
| | ACCGAGTCGGTGCTCGAAGGGGCTGCG | Motif |
| | TACCACACCCGTCGCATTGAACATTGAC | [CGCGTCTCTACGTGGGGGCGCG |
| | GCGTCTCTACGTGGGGGCGCG (SEQ ID | (Sequence Number: 1850)] |
| | NO: 1061) | |
| 1062 | CTTCTCCAATGCGACGGGTGGTTTTAGA | pegRNA*2 (TGG-to-TTG PAM |
| | GCTAGAAATAGCAAGTTAAAATAAGGC | silencing edit); contains gRNA core |
| | TAGTCCGTTATCAACTTGAAAAAGTGGC | SEQ ID NO: 1854, and Linker |
| | ACCGAGTCGGTGCGAAGGGGCTGCGTA | [AACATTGA (Sequence Number: |
| | CAACACCCGTCGCATTGGAAACATTGA | 1728)] + Univ. 3′ Motif |
| | CGCGTCTCTACGTGGGGGCGCG (SEQ ID | [CGCGTCTCTACGTGGGGGCGCG |
| | NO: 1062) | (Sequence Number: 1850)] |
| 1063 | CTTCTCCAATGCGACGGGTGGTTTTAGA | pegRNA*2 (TGG-to-TTG PAM |
| | GCTAGAAATAGCAAGTTAAAATAAGGC | silencing edit); contains gRNA core |
| | TAGTCCGTTATCAACTTGAAAAAGTGGC | SEQ ID NO: 1854, and Linker |
| | ACCGAGTCGGTGCTCGAAGGGGCTGCG | [AACATTGA (Sequence Number: |
| | TACAACACCCGTCGCATTGAACATTGAC | 1728)] + Univ. 3′ Motif |
| | GCGTCTCTACGTGGGGGCGCG (SEQ ID | [CGCGTCTCTACGTGGGGGCGCG |
| | NO: 1063) | (Sequence Number: 1850)] |
| 1064 | CTTCTCCAATGCGACGGGTGGTTTTAGA | pegRNA; contains gRNA core SEQ ID |
| | GCTAGAAATAGCAAGTTAAAATAAGGC | NO: 1854, and Linker [AACATTGA |
| | TAGTCCGTTATCAACTTGAAAAAGTGGC | (Sequence Number: 1728)] + Univ. 3′ |
| | ACCGAGTCGGTGCGAAGGGGCTGCGTA | Motif |
| | CCACACCCGTCGCATTGGAGAACATTG | [CGCGTCTCTACGTGGGGGCGCG |
| | ACGCGTCTCTACGTGGGGGCGCG (SEQ | (Sequence Number: 1850)] |
| | ID NO: 1064) | |
| 1065 | CTTCTCCAATGCGACGGGTGGTTTTAGA | pegRNA; contains gRNA core SEQ ID |
| | GCTAGAAATAGCAAGTTAAAATAAGGC | NO: 1854, and Linker [AACATTGA |
| | TAGTCCGTTATCAACTTGAAAAAGTGGC | (Sequence Number: 1728)] + Univ. 3′ |
| | ACCGAGTCGGTGCTCGAAGGGGCTGCG | Motif |
| | TACCACACCCGTCGCATTGGAACATTGA | [CGCGTCTCTACGTGGGGGCGCG |
| | CGCGTCTCTACGTGGGGGCGCG (SEQ ID | (Sequence Number: 1850)] |
| | NO: 1065) | |
| 1066 | CTTCTCCAATGCGACGGGTGGTTTTAGA | pegRNA; contains gRNA core SEQ ID |
| | GCTAGAAATAGCAAGTTAAAATAAGGC | NO: 1854, and Linker [AACATTGA |
| | TAGTCCGTTATCAACTTGAAAAAGTGGC | (Sequence Number: 1728)] + Univ. 3′ |
| | ACCGAGTCGGTGCACTCGAAGGGGCTG | Motif |
| | CGTACCACACCCGTCGCATTAACATTGA | [CGCGTCTCTACGTGGGGGCGCG |
| | CGCGTCTCTACGTGGGGGCGCG (SEQ ID | (Sequence Number: 1850)] |
| | NO: 1066) | |
| 1067 | CTTCTCCAATGCGACGGGTGGTTTTAGA | pegRNA; contains gRNA core SEQ ID |
| | GCTAGAAATAGCAAGTTAAAATAAGGC | NO: 1854, and Linker [AACATTGA |
| | TAGTCCGTTATCAACTTGAAAAAGTGGC | (Sequence Number: 1728)] + Univ. 3′ |
| | ACCGAGTCGGTGCGTACTCGAAGGGGC | Motif |
| | TGCGTACCACACCCGTCGCAAACATTG | [CGCGTCTCTACGTGGGGGCGCG |
| | ACGCGTCTCTACGTGGGGGCGCG (SEQ | (Sequence Number: 1850)] |
| | ID NO: 1067) | |
| 1068 | CTTCTCCAATGCGACGGGTGGTTTTAGA | pegRNA*3 (TGG-to-TCG PAM |
| | GCTAGAAATAGCAAGTTAAAATAAGGC | silencing edit); contains gRNA core |
| | TAGTCCGTTATCAACTTGAAAAAGTGGC | SEQ ID NO: 1854, and Linker |
| | ACCGAGTCGGTGCGAAGGGGCTGCGTA | [AACATTGA (Sequence Number: |
| | CGACACCCGTCGCATTGGAGAACATTG | 1728)] + Univ. 3′ Motif |
| | ACGCGTCTCTACGTGGGGGCGCG (SEQ | [CGCGTCTCTACGTGGGGGCGCG |
| | ID NO: 1068) | (Sequence Number: 1850)] |
| 1069 | CTTCTCCAATGCGACGGGTGGTTTTAGA | pegRNA*3 (TGG-to-TCG PAM |
| | GCTAGAAATAGCAAGTTAAAATAAGGC | silencing edit); contains gRNA core |
| | TAGTCCGTTATCAACTTGAAAAAGTGGC | SEQ ID NO: 1854, and Linker |
| | ACCGAGTCGGTGCTCGAAGGGGCTGCG | [AACATTGA (Sequence Number: |
| | TACGACACCCGTCGCATTGGAACATTG | 1728)] + Univ. 3′ Motif |
| | ACGCGTCTCTACGTGGGGGCGCG (SEQ | [CGCGTCTCTACGTGGGGGCGCG |
| | ID NO: 1069) | (Sequence Number: 1850)] |
| 1070 | CTTCTCCAATGCGACGGGTGGTTTTAGA | pegRNA*1 (TGG-to-TAG PAM |
| | GCTAGAAATAGCAAGTTAAAATAAGGC | silencing edit); contains gRNA core |
| | TAGTCCGTTATCAACTTGAAAAAGTGGC | SEQ ID NO: 1854, and Linker |
| | ACCGAGTCGGTGCGAAGGGGCTGCGTA | [AACATTGA (Sequence Number: |
| | CTACACCCGTCGCATTGGAGAACATTG | 1728)] + Univ. 3′ Motif |
| | ACGCGTCTCTACGTGGGGGCGCG (SEQ | [CGCGTCTCTACGTGGGGGCGCG |
| | ID NO: 1070) | (Sequence Number: 1850)] |
| 1071 | CTTCTCCAATGCGACGGGTGGTTTTAGA | pegRNA*1 (TGG-to-TAG PAM |
| | GCTAGAAATAGCAAGTTAAAATAAGGC | silencing edit); contains gRNA core |
| | TAGTCCGTTATCAACTTGAAAAAGTGGC | SEQ ID NO: 1854, and Linker |
| | ACCGAGTCGGTGCTCGAAGGGGCTGCG | [AACATTGA (Sequence Number: |
| | TACTACACCCGTCGCATTGGAACATTGA | 1728)] + Univ. 3′ Motif |
| | CGCGTCTCTACGTGGGGGCGCG (SEQ ID | [CGCGTCTCTACGTGGGGGCGCG |
| | NO: 1071) | (Sequence Number: 1850)] |
| 1072 | CTTCTCCAATGCGACGGGTGGTTTTAGA | pegRNA*2 (TGG-to-TTG PAM |
| | GCTAGAAATAGCAAGTTAAAATAAGGC | silencing edit); contains gRNA core |
| | TAGTCCGTTATCAACTTGAAAAAGTGGC | SEQ ID NO: 1854, and Linker |
| | ACCGAGTCGGTGCGAAGGGGCTGCGTA | [AACATTGA (Sequence Number: |
| | CAACACCCGTCGCATTGGAGAACATTG | 1728)] + Univ. 3′ Motif |
| | ACGCGTCTCTACGTGGGGGCGCG (SEQ | [CGCGTCTCTACGTGGGGGCGCG |
| | ID NO: 1072) | (Sequence Number: 1850)] |
| 1073 | CTTCTCCAATGCGACGGGTGGTTTTAGA | pegRNA*2 (TGG-to-TTG PAM |
| | GCTAGAAATAGCAAGTTAAAATAAGGC | silencing edit); contains gRNA core |
| | TAGTCCGTTATCAACTTGAAAAAGTGGC | SEQ ID NO: 1854, and Linker |
| | ACCGAGTCGGTGCTCGAAGGGGCTGCG | [AACATTGA (Sequence Number: |
| | TACAACACCCGTCGCATTGGAACATTG | 1728)] + Univ. 3′ Motif |
| | ACGCGTCTCTACGTGGGGGCGCG (SEQ | [CGCGTCTCTACGTGGGGGCGCG |
| | ID NO: 1073) | (Sequence Number: 1850)] |
| 1074 | CTTCTCCAATGCGACGGGTGGTTTTAGA | pegRNA*3 (TGG-to-TCG PAM |
| | GCTAGAAATAGCAAGTTAAAATAAGGC | silencing edit); contains gRNA core |
| | TAGTCCGTTATCAACTTGAAAAAGTGGC | SEQ ID NO: 1854, and Linker |
| | ACCGAGTCGGTGCGAAGGGGCTGCGTA | [AACATTGA (Sequence Number: |
| | CGACACCCGTCGCATTGGAGAAACATT | 1728)] + Univ. 3′ Motif |
| | GACGCGTCTCTACGTGGGGGCGCG (SEQ | [CGCGTCTCTACGTGGGGGCGCG |
| | ID NO: 1074) | (Sequence Number: 1850)] |
| 1075 | CTTCTCCAATGCGACGGGTGGTTTTAGA | pegRNA*3 (TGG-to-TCG PAM |
| | GCTAGAAATAGCAAGTTAAAATAAGGC | silencing edit); contains gRNA core |
| | TAGTCCGTTATCAACTTGAAAAAGTGGC | SEQ ID NO: 1854, and Linker |
| | ACCGAGTCGGTGCTCGAAGGGGCTGCG | [AACATTGA (Sequence Number: |
| | TACGACACCCGTCGCATTGGAAACATT | 1728)] + Univ. 3′ Motif |
| | GACGCGTCTCTACGTGGGGGCGCG (SEQ | [CGCGTCTCTACGTGGGGGCGCG |
| | ID NO: 1075) | (Sequence Number: 1850)] |
| 1076 | CTTCTCCAATGCGACGGGTGGTTTTAGA | pegRNA*1 (TGG-to-TAG PAM |
| | GCTAGAAATAGCAAGTTAAAATAAGGC | silencing edit); contains gRNA core |
| | TAGTCCGTTATCAACTTGAAAAAGTGGC | SEQ ID NO: 1854, and Linker |
| | ACCGAGTCGGTGCGAAGGGGCTGCGTA | [AACATTGA (Sequence Number: |
| | CTACACCCGTCGCATTGGAGAAACATT | 1728)] + Univ. 3′ Motif |
| | GACGCGTCTCTACGTGGGGGCGCG (SEQ | [CGCGTCTCTACGTGGGGGCGCG |
| | ID NO: 1076) | (Sequence Number: 1850)] |
| 1077 | CTTCTCCAATGCGACGGGTGGTTTTAGA | pegRNA*1 (TGG-to-TAG PAM |
| | GCTAGAAATAGCAAGTTAAAATAAGGC | silencing edit); contains gRNA core |
| | TAGTCCGTTATCAACTTGAAAAAGTGGC | SEQ ID NO: 1854, and Linker |
| | ACCGAGTCGGTGCTCGAAGGGGCTGCG | [AACATTGA (Sequence Number: |
| | TACTACACCCGTCGCATTGGAAACATTG | 1728)] + Univ. 3′ Motif |
| | ACGCGTCTCTACGTGGGGGCGCG (SEQ | [CGCGTCTCTACGTGGGGGCGCG |
| | ID NO: 1077) | (Sequence Number: 1850)] |
| 1078 | CTTCTCCAATGCGACGGGTGGTTTTAGA | pegRNA; contains gRNA core SEQ ID |
| | GCTAGAAATAGCAAGTTAAAATAAGGC | NO: 1854, and Linker [AACATTGA |
| | TAGTCCGTTATCAACTTGAAAAAGTGGC | (Sequence Number: 1728)] + Univ. 3′ |
| | ACCGAGTCGGTGCGAAGGGGCTGCGTA | Motif |
| | CCACACCCGTCGCATTGGAGAAACATT | [CGCGTCTCTACGTGGGGGCGCG |
| | GACGCGTCTCTACGTGGGGGCGCG (SEQ | (Sequence Number: 1850)] |
| | ID NO: 1078) | |
| 1079 | CTTCTCCAATGCGACGGGTGGTTTTAGA | pegRNA; contains gRNA core SEQ ID |
| | GCTAGAAATAGCAAGTTAAAATAAGGC | NO: 1854, and Linker [AACATTGA |
| | TAGTCCGTTATCAACTTGAAAAAGTGGC | (Sequence Number: 1728)] + Univ. 3′ |
| | ACCGAGTCGGTGCTCGAAGGGGCTGCG | Motif |
| | TACCACACCCGTCGCATTGGAAACATTG | [CGCGTCTCTACGTGGGGGCGCG |
| | ACGCGTCTCTACGTGGGGGCGCG (SEQ | (Sequence Number: 1850)] |
| | ID NO: 1079) | |
| 1080 | CTTCTCCAATGCGACGGGTGGTTTTAGA | pegRNA*2 (TGG-to-TTG PAM |
| | GCTAGAAATAGCAAGTTAAAATAAGGC | silencing edit); contains gRNA core |
| | TAGTCCGTTATCAACTTGAAAAAGTGGC | SEQ ID NO: 1854, and Linker |
| | ACCGAGTCGGTGCGAAGGGGCTGCGTA | [AACATTGA (Sequence Number: |
| | CAACACCCGTCGCATTGGAGAAACATT | 1728)] + Univ. 3′ Motif |
| | GACGCGTCTCTACGTGGGGGCGCG (SEQ | [CGCGTCTCTACGTGGGGGCGCG |
| | ID NO: 1080) | (Sequence Number: 1850)] |
| 1081 | CTTCTCCAATGCGACGGGTGGTTTTAGA | pegRNA*2 (TGG-to-TTG PAM |
| | GCTAGAAATAGCAAGTTAAAATAAGGC | silencing edit); contains gRNA core |
| | TAGTCCGTTATCAACTTGAAAAAGTGGC | SEQ ID NO: 1854, and Linker |
| | ACCGAGTCGGTGCTCGAAGGGGCTGCG | [AACATTGA (Sequence Number: |
| | TACAACACCCGTCGCATTGGAAACATT | 1728)] + Univ. 3′ Motif |
| | GACGCGTCTCTACGTGGGGGCGCG (SEQ | [CGCGTCTCTACGTGGGGGCGCG |
| | ID NO: 1081) | (Sequence Number: 1850)] |
| 1082 | CTTCTCCAATGCGACGGGTGGTTTTAGA | pegRNA; contains gRNA core SEQ ID |
| | GCTAGAAATAGCAAGTTAAAATAAGGC | NO: 1854, and Linker [AACATTGA |
| | TAGTCCGTTATCAACTTGAAAAAGTGGC | (Sequence Number: 1728)] + Univ. 3′ |
| | ACCGAGTCGGTGCTCGAAGGGGCTGCG | Motif |
| | TACCACACCCGTCGCATTGGAGAACATT | [CGCGTCTCTACGTGGGGGCGCG |
| | GACGCGTCTCTACGTGGGGGCGCG (SEQ | (Sequence Number: 1850)] |
| | ID NO: 1082) | |
| 1083 | CTTCTCCAATGCGACGGGTGGTTTTAGA | pegRNA; contains gRNA core SEQ ID |
| | GCTAGAAATAGCAAGTTAAAATAAGGC | NO: 1854, and Linker [AACATTGA |
| | TAGTCCGTTATCAACTTGAAAAAGTGGC | (Sequence Number: 1728)] + Univ. 3′ |
| | ACCGAGTCGGTGCACTCGAAGGGGCTG | Motif |
| | CGTACCACACCCGTCGCATTGGAACATT | [CGCGTCTCTACGTGGGGGCGCG |
| | GACGCGTCTCTACGTGGGGGCGCG (SEQ | (Sequence Number: 1850)] |
| | ID NO: 1083) | |
| 1084 | CTTCTCCAATGCGACGGGTGGTTTTAGA | pegRNA; contains gRNA core SEQ ID |
| | GCTAGAAATAGCAAGTTAAAATAAGGC | NO: 1854, and Linker [AACATTGA |
| | TAGTCCGTTATCAACTTGAAAAAGTGGC | (Sequence Number: 1728)] + Univ. 3′ |
| | ACCGAGTCGGTGCGTACTCGAAGGGGC | Motif |
| | TGCGTACCACACCCGTCGCATTAACATT | [CGCGTCTCTACGTGGGGGCGCG |
| | GACGCGTCTCTACGTGGGGGCGCG (SEQ | (Sequence Number: 1850)] |
| | ID NO: 1084) | |
| 1085 | CTTCTCCAATGCGACGGGTGGTTTTAGA | pegRNA; contains gRNA core SEQ ID |
| | GCTAGAAATAGCAAGTTAAAATAAGGC | NO: 1854, and Linker [AACATTGA |
| | TAGTCCGTTATCAACTTGAAAAAGTGGC | (Sequence Number: 1728)] + Univ. 3′ |
| | ACCGAGTCGGTGCGGGTACTCGAAGGG | Motif |
| | GCTGCGTACCACACCCGTCGCAAACATT | [CGCGTCTCTACGTGGGGGCGCG |
| | GACGCGTCTCTACGTGGGGGCGCG (SEQ | (Sequence Number: 1850)] |
| | ID NO: 1085) | |
| 1086 | CTTCTCCAATGCGACGGGTGGTTTTAGA | pegRNA*3 (TGG-to-TCG PAM |
| | GCTAGAAATAGCAAGTTAAAATAAGGC | silencing edit); contains gRNA core |
| | TAGTCCGTTATCAACTTGAAAAAGTGGC | SEQ ID NO: 1854, and Linker |
| | ACCGAGTCGGTGCGAAGGGGCTGCGTA | [AACATTGA (Sequence Number: |
| | CGACACCCGTCGCATTGGAGAAAACAT | 1728)] + Univ. 3′ Motif |
| | TGACGCGTCTCTACGTGGGGGCGCG | [CGCGTCTCTACGTGGGGGCGCG |
| | (SEQ ID NO: 1086) | (Sequence Number: 1850)] |
| 1087 | CTTCTCCAATGCGACGGGTGGTTTTAGA | pegRNA*3 (TGG-to-TCG PAM |
| | GCTAGAAATAGCAAGTTAAAATAAGGC | silencing edit); contains gRNA core |
| | TAGTCCGTTATCAACTTGAAAAAGTGGC | SEQ ID NO: 1854, and Linker |
| | ACCGAGTCGGTGCTCGAAGGGGCTGCG | [AACATTGA (Sequence Number: |
| | TACGACACCCGTCGCATTGGAGAACAT | 1728)] + Univ. 3′ Motif |
| | TGACGCGTCTCTACGTGGGGGCGCG | [CGCGTCTCTACGTGGGGGCGCG |
| | (SEQ ID NO: 1087) | (Sequence Number: 1850)] |
| 1088 | CTTCTCCAATGCGACGGGTGGTTTTAGA | pegRNA*1 (TGG-to-TAG PAM |
| | GCTAGAAATAGCAAGTTAAAATAAGGC | silencing edit); contains gRNA core |
| | TAGTCCGTTATCAACTTGAAAAAGTGGC | SEQ ID NO: 1854, and Linker |
| | ACCGAGTCGGTGCGAAGGGGCTGCGTA | [AACATTGA (Sequence Number: |
| | CTACACCCGTCGCATTGGAGAAAACAT | 1728)] + Univ. 3′ Motif |
| | TGACGCGTCTCTACGTGGGGGCGCG | [CGCGTCTCTACGTGGGGGCGCG |
| | (SEQ ID NO: 1088) | (Sequence Number: 1850)] |
| 1089 | CTTCTCCAATGCGACGGGTGGTTTTAGA | pegRNA*1 (TGG-to-TAG PAM |
| | GCTAGAAATAGCAAGTTAAAATAAGGC | silencing edit); contains gRNA core |
| | TAGTCCGTTATCAACTTGAAAAAGTGGC | SEQ ID NO: 1854, and Linker |
| | ACCGAGTCGGTGCTCGAAGGGGCTGCG | [AACATTGA (Sequence Number: |
| | TACTACACCCGTCGCATTGGAGAACATT | 1728)] + Univ. 3′ Motif |
| | GACGCGTCTCTACGTGGGGGCGCG (SEQ | [CGCGTCTCTACGTGGGGGCGCG |
| | ID NO: 1089) | (Sequence Number: 1850)] |
| 1090 | CTTCTCCAATGCGACGGGTGGTTTTAGA | pegRNA; contains gRNA core SEQ ID |
| | GCTAGAAATAGCAAGTTAAAATAAGGC | NO: 1854, and Linker [AACATTGA |
| | TAGTCCGTTATCAACTTGAAAAAGTGGC | (Sequence Number: 1728)] + Univ. 3′ |
| | ACCGAGTCGGTGCGAAGGGGCTGCGTA | Motif |
| | CCACACCCGTCGCATTGGAGAAAACAT | [CGCGTCTCTACGTGGGGGCGCG |
| | TGACGCGTCTCTACGTGGGGGCGCG | (Sequence Number: 1850)] |
| | (SEQ ID NO: 1090) | |
| 1091 | CTTCTCCAATGCGACGGGTGGTTTTAGA | pegRNA*2 (TGG-to-TTG PAM |
| | GCTAGAAATAGCAAGTTAAAATAAGGC | silencing edit); contains gRNA core |
| | TAGTCCGTTATCAACTTGAAAAAGTGGC | SEQ ID NO: 1854, and Linker |
| | ACCGAGTCGGTGCGAAGGGGCTGCGTA | [AACATTGA (Sequence Number: |
| | CAACACCCGTCGCATTGGAGAAAACAT | 1728)] + Univ. 3′ Motif |
| | TGACGCGTCTCTACGTGGGGGCGCG | [CGCGTCTCTACGTGGGGGCGCG |
| | (SEQ ID NO: 1091) | (Sequence Number: 1850)] |
| 1092 | CTTCTCCAATGCGACGGGTGGTTTTAGA | pegRNA*2 (TGG-to-TTG PAM |
| | GCTAGAAATAGCAAGTTAAAATAAGGC | silencing edit); contains gRNA core |
| | TAGTCCGTTATCAACTTGAAAAAGTGGC | SEQ ID NO: 1854, and Linker |
| | ACCGAGTCGGTGCTCGAAGGGGCTGCG | [AACATTGA (Sequence Number: |
| | TACAACACCCGTCGCATTGGAGAACAT | 1728)] + Univ. 3′ Motif |
| | TGACGCGTCTCTACGTGGGGGCGCG | [CGCGTCTCTACGTGGGGGCGCG |
| | (SEQ ID NO: 1092) | (Sequence Number: 1850)] |
| 1093 | GCTTCTCCAATGCGACGGGTGGTTTTAG | pegRNA*1 (TGG-to-TAG PAM |
| | AGCTAGAAATAGCAAGTTAAAATAAGG | silencing edit); contains gRNA core |
| | CTAGTCCGTTATCAACTTGAAAAAGTGG | SEQ ID NO: 1854, Linker |
| | CACCGAGTCGGTGCGAAGGGGCTGCGT | [AACATTGA (Sequence Number: |
| | ACTACACCCGTCGCAAACATTGACGCG | 1728)] + Univ. 3′ Motif |
| | TCTCTACGTGGGGGCGCGTTTTTTT (SEQ | [CGCGTCTCTACGTGGGGGCGCG |
| | ID NO: 1093) | (Sequence Number: 1850)], and |
| | | transcription adaptations |
| 1094 | CTTCTCCAATGCGACGGGTGGTTTTAGA | pegRNA*3 (TGG-to-TCG PAM |
| | GCTAGAAATAGCAAGTTAAAATAAGGC | silencing edit); contains gRNA core |
| | TAGTCCGTTATCAACTTGAAAAAGTGGC | SEQ ID NO: 1854, and Linker |
| | ACCGAGTCGGTGCTCGAAGGGGCTGCG | [AACATTGA (Sequence Number: |
| | TACGACACCCGTCGCATTGGAGAAACA | 1728)] + Univ. 3′ Motif |
| | TTGACGCGTCTCTACGTGGGGGCGCG | [CGCGTCTCTACGTGGGGGCGCG |
| | (SEQ ID NO: 1094) | (Sequence Number: 1850)] |
| 1095 | CTTCTCCAATGCGACGGGTGGTTTTAGA | pegRNA*1 (TGG-to-TAG PAM |
| | GCTAGAAATAGCAAGTTAAAATAAGGC | silencing edit); contains gRNA core |
| | TAGTCCGTTATCAACTTGAAAAAGTGGC | SEQ ID NO: 1854, and Linker |
| | ACCGAGTCGGTGCTCGAAGGGGCTGCG | [AACATTGA (Sequence Number: |
| | TACTACACCCGTCGCATTGGAGAAACA | 1728)] + Univ. 3′ Motif |
| | TTGACGCGTCTCTACGTGGGGGCGCG | [CGCGTCTCTACGTGGGGGCGCG |
| | (SEQ ID NO: 1095) | (Sequence Number: 1850)] |
| 1096 | CTTCTCCAATGCGACGGGTGGTTTTAGA | pegRNA; contains gRNA core SEQ ID |
| | GCTAGAAATAGCAAGTTAAAATAAGGC | NO: 1854, and Linker [AACATTGA |
| | TAGTCCGTTATCAACTTGAAAAAGTGGC | (Sequence Number: 1728)] + Univ. 3′ |
| | ACCGAGTCGGTGCTCGAAGGGGCTGCG | Motif |
| | TACCACACCCGTCGCATTGGAGAAACA | [CGCGTCTCTACGTGGGGGCGCG |
| | TTGACGCGTCTCTACGTGGGGGCGCG | (Sequence Number: 1850)] |
| | (SEQ ID NO: 1096) | |
| 1097 | CTTCTCCAATGCGACGGGTGGTTTTAGA | pegRNA*2 (TGG-to-TTG PAM |
| | GCTAGAAATAGCAAGTTAAAATAAGGC | silencing edit); contains gRNA core |
| | TAGTCCGTTATCAACTTGAAAAAGTGGC | SEQ ID NO: 1854, and Linker |
| | ACCGAGTCGGTGCTCGAAGGGGCTGCG | [AACATTGA (Sequence Number: |
| | TACAACACCCGTCGCATTGGAGAAACA | 1728)] + Univ. 3′ Motif |
| | TTGACGCGTCTCTACGTGGGGGCGCG | [CGCGTCTCTACGTGGGGGCGCG |
| | (SEQ ID NO: 1097) | (Sequence Number: 1850)] |
| 1098 | GCTTCTCCAATGCGACGGGTGGTTTTAG | pegRNA*1 (TGG-to-TAG PAM |
| | AGCTAGAAATAGCAAGTTAAAATAAGG | silencing edit); contains gRNA core |
| | CTAGTCCGTTATCAACTTGAAAAAGTGG | SEQ ID NO: 1854, Linker |
| | CACCGAGTCGGTGCGAAGGGGCTGCGT | [AACATTGA (Sequence Number: |
| | ACTACACCCGTCGCATAACATTGACGC | 1728)] + Univ. 3′ Motif |
| | GTCTCTACGTGGGGGCGCGTTTTTTT | [CGCGTCTCTACGTGGGGGCGCG |
| | (SEQ ID NO: 1098) | (Sequence Number: 1850)], and |
| | | transcription adaptations |
| 1099 | CTTCTCCAATGCGACGGGTGGTTTTAGA | pegRNA; contains gRNA core SEQ ID |
| | GCTAGAAATAGCAAGTTAAAATAAGGC | NO: 1854, and Linker [AACATTGA |
| | TAGTCCGTTATCAACTTGAAAAAGTGGC | (Sequence Number: 1728)] + Univ. 3′ |
| | ACCGAGTCGGTGCACTCGAAGGGGCTG | Motif |
| | CGTACCACACCCGTCGCATTGGAGAAC | [CGCGTCTCTACGTGGGGGCGCG |
| | ATTGACGCGTCTCTACGTGGGGGCGCG | (Sequence Number: 1850)] |
| | (SEQ ID NO: 1099) | |
| 1100 | CTTCTCCAATGCGACGGGTGGTTTTAGA | pegRNA; contains gRNA core SEQ ID |
| | GCTAGAAATAGCAAGTTAAAATAAGGC | NO: 1854, and Linker [AACATTGA |
| | TAGTCCGTTATCAACTTGAAAAAGTGGC | (Sequence Number: 1728)] + Univ. 3′ |
| | ACCGAGTCGGTGCGTACTCGAAGGGGC | Motif |
| | TGCGTACCACACCCGTCGCATTGGAAC | [CGCGTCTCTACGTGGGGGCGCG |
| | ATTGACGCGTCTCTACGTGGGGGCGCG | (Sequence Number: 1850)] |
| | (SEQ ID NO: 1100) | |
| 1101 | CTTCTCCAATGCGACGGGTGGTTTTAGA | pegRNA; contains gRNA core SEQ ID |
| | GCTAGAAATAGCAAGTTAAAATAAGGC | NO: 1854, and Linker [AACATTGA |
| | TAGTCCGTTATCAACTTGAAAAAGTGGC | (Sequence Number: 1728)] + Univ. 3′ |
| | ACCGAGTCGGTGCGGGTACTCGAAGGG | Motif |
| | GCTGCGTACCACACCCGTCGCATTAACA | [CGCGTCTCTACGTGGGGGCGCG |
| | TTGACGCGTCTCTACGTGGGGGCGCG | (Sequence Number: 1850)] |
| | (SEQ ID NO: 1101) | |
| 1102 | CTTCTCCAATGCGACGGGTGGTTTTAGA | pegRNA; contains gRNA core SEQ ID |
| | GCTAGAAATAGCAAGTTAAAATAAGGC | NO: 1854, and Linker [AACATTGA |
| | TAGTCCGTTATCAACTTGAAAAAGTGGC | (Sequence Number: 1728)] + Univ. 3′ |
| | ACCGAGTCGGTGCGTGGGTACTCGAAG | Motif |
| | GGGCTGCGTACCACACCCGTCGCAAAC | [CGCGTCTCTACGTGGGGGCGCG |
| | ATTGACGCGTCTCTACGTGGGGGCGCG | (Sequence Number: 1850)] |
| | (SEQ ID NO: 1102) | |
| 1103 | CTTCTCCAATGCGACGGGTGGTTTTAGA | pegRNA*3 (TGG-to-TCG PAM |
| | GCTAGAAATAGCAAGTTAAAATAAGGC | silencing edit); contains gRNA core |
| | TAGTCCGTTATCAACTTGAAAAAGTGGC | SEQ ID NO: 1854, and Linker |
| | ACCGAGTCGGTGCTCGAAGGGGCTGCG | [AACATTGA (Sequence Number: |
| | TACGACACCCGTCGCATTGGAGAAAAC | 1728)] + Univ. 3′ Motif |
| | ATTGACGCGTCTCTACGTGGGGGCGCG | [CGCGTCTCTACGTGGGGGCGCG |
| | (SEQ ID NO: 1103) | (Sequence Number: 1850)] |
| 1104 | CTTCTCCAATGCGACGGGTGGTTTTAGA | pegRNA*1 (TGG-to-TAG PAM |
| | GCTAGAAATAGCAAGTTAAAATAAGGC | silencing edit); contains gRNA core |
| | TAGTCCGTTATCAACTTGAAAAAGTGGC | SEQ ID NO: 1854, and Linker |
| | ACCGAGTCGGTGCTCGAAGGGGCTGCG | [AACATTGA (Sequence Number: |
| | TACTACACCCGTCGCATTGGAGAAAAC | 1728)] + Univ. 3′ Motif |
| | ATTGACGCGTCTCTACGTGGGGGCGCG | [CGCGTCTCTACGTGGGGGCGCG |
| | (SEQ ID NO: 1104) | (Sequence Number: 1850)] |
| 1105 | CTTCTCCAATGCGACGGGTGGTTTTAGA | pegRNA; contains gRNA core SEQ ID |
| | GCTAGAAATAGCAAGTTAAAATAAGGC | NO: 1854, and Linker [AACATTGA |
| | TAGTCCGTTATCAACTTGAAAAAGTGGC | (Sequence Number: 1728)] + Univ. 3′ |
| | ACCGAGTCGGTGCTCGAAGGGGCTGCG | Motif |
| | TACCACACCCGTCGCATTGGAGAAAAC | [CGCGTCTCTACGTGGGGGCGCG |
| | ATTGACGCGTCTCTACGTGGGGGCGCG | (Sequence Number: 1850)] |
| | (SEQ ID NO: 1105) | |
| 1106 | CTTCTCCAATGCGACGGGTGGTTTTAGA | pegRNA*2 (TGG-to-TTG PAM |
| | GCTAGAAATAGCAAGTTAAAATAAGGC | silencing edit); contains gRNA core |
| | TAGTCCGTTATCAACTTGAAAAAGTGGC | SEQ ID NO: 1854, and Linker |
| | ACCGAGTCGGTGCTCGAAGGGGCTGCG | [AACATTGA (Sequence Number: |
| | TACAACACCCGTCGCATTGGAGAAAAC | 1728)] + Univ. 3′ Motif |
| | ATTGACGCGTCTCTACGTGGGGGCGCG | [CGCGTCTCTACGTGGGGGCGCG |
| | (SEQ ID NO: 1106) | (Sequence Number: 1850)] |
| 1107 | GCTTCTCCAATGCGACGGGTGGTTTTAG | pegRNA*1 (TGG-to-TAG PAM |
| | AGCTAGAAATAGCAAGTTAAAATAAGG | silencing edit); contains gRNA core |
| | CTAGTCCGTTATCAACTTGAAAAAGTGG | SEQ ID NO: 1854, Linker |
| | CACCGAGTCGGTGCTCGAAGGGGCTGC | [AACATTGA (Sequence Number: |
| | GTACTACACCCGTCGCAAACATTGACG | 1728)] + Univ. 3′ Motif |
| | CGTCTCTACGTGGGGGCGCGTTTTTTT | [CGCGTCTCTACGTGGGGGCGCG |
| | (SEQ ID NO: 1107) | (Sequence Number: 1850)], and |
| | | transcription adaptations |
| 1108 | GCTTCTCCAATGCGACGGGTGGTTTTAG | pegRNA*3 (TGG-to-TCG PAM |
| | AGCTAGAAATAGCAAGTTAAAATAAGG | silencing edit); contains gRNA core |
| | CTAGTCCGTTATCAACTTGAAAAAGTGG | SEQ ID NO: 1854, Linker [TACCAT |
| | CACCGAGTCGGTGCTCGAAGGGGCTGC | (Sequence Number: 1768)] + Univ. 3′ |
| | GTACGACACCCGTCGCATTGGTACCATC | Motif |
| | GGGTCTCTACGTGGGGGCCCGTTTTTTT | [CGGGTCTCTACGTGGGGGCCCG |
| | (SEQ ID NO: 1108) | (Sequence Number: 1851)], and |
| | | transcription adaptations |
| 1109 | GCTTCTCCAATGCGACGGGTGGTTTAAG | pegRNA*3 (TGG-to-TCG PAM |
| | AGCTAGAAATAGCAAGTTTAAATAAGG | silencing edit); contains gRNA core |
| | CTAGTCCGTTATCAACTTGAAAAAGTGG | SEQ ID NO: 1855, Linker [TACCAT |
| | CACCGAGTCGGTGCTCGAAGGGGCTGC | (Sequence Number: 1768)] + Univ. 3′ |
| | GTACGACACCCGTCGCATTGGTACCATC | Motif |
| | GGGTCTCTACGTGGGGGCCCGTTTTTTT | [CGGGTCTCTACGTGGGGGCCCG |
| | (SEQ ID NO: 1109) | (Sequence Number: 1851)], and |
| | | transcription adaptations |
| 1110 | GCTTCTCCAATGCGACGGGTGGTTTAAG | pegRNA*3 (TGG-to-TCG PAM |
| | AGCTAGAAATAGCAAGTTTAAATAAGG | silencing edit); contains gRNA core |
| | CTAGTCCGTTATCAGCGTGAAAACGCG | SEQ ID NO: 1856, Linker [TACCAT |
| | GCACCGAGTCGGTGCTCGAAGGGGCTG | (Sequence Number: 1768)] + Univ. 3′ |
| | CGTACGACACCCGTCGCATTGGTACCAT | Motif |
| | CGGGTCTCTACGTGGGGGCCCGTTTTTT | [CGGGTCTCTACGTGGGGGCCCG |
| | T (SEQ ID NO: 1110) | (Sequence Number: 1851)], and |
| | | transcription adaptations |
| 1111 | GCTTCTCCAATGCGACGGGTGGTTTTAG | pegRNA*3 (TGG-to-TCG PAM |
| | AGCTAGAAATAGCAAGTTAAAATAAGG | silencing edit); contains gRNA core |
| | CTAGTCCGTTATCAACTTGAAAAAGTGG | SEQ ID NO: 1854, Linker [TATTCT |
| | CACCGAGTCGGTGCTCGAAGGGGCTGC | (Sequence Number: 1769)] + Univ. 3′ |
| | GTACGACACCCGTCGCATTGGTATTCTC | Motif |
| | GGGTCTCTACGTGGGGGCCCGTTTTTTT | [CGGGTCTCTACGTGGGGGCCCG |
| | (SEQ ID NO: 1111) | (Sequence Number: 1851)], and |
| | | transcription adaptations |
| 1112 | GCTTCTCCAATGCGACGGGTGGTTTAAG | pegRNA*3 (TGG-to-TCG PAM |
| | AGCTAGAAATAGCAAGTTTAAATAAGG | silencing edit); contains gRNA core |
| | CTAGTCCGTTATCAACTTGAAAAAGTGG | SEQ ID NO: 1855, Linker [TATTCT |
| | CACCGAGTCGGTGCTCGAAGGGGCTGC | (Sequence Number: 1769)] + Univ. 3′ |
| | GTACGACACCCGTCGCATTGGTATTCTC | Motif |
| | GGGTCTCTACGTGGGGGCCCGTTTTTTT | [CGGGTCTCTACGTGGGGGCCCG |
| | (SEQ ID NO: 1112) | (Sequence Number: 1851)], and |
| | | transcription adaptations |
| 1113 | GCTTCTCCAATGCGACGGGTGGTTTAAG | pegRNA*3 (TGG-to-TCG PAM |
| | AGCTAGAAATAGCAAGTTTAAATAAGG | silencing edit); contains gRNA core |
| | CTAGTCCGTTATCAGCGTGAAAACGCG | SEQ ID NO: 1856, Linker [TATTCT |
| | GCACCGAGTCGGTGCTCGAAGGGGCTG | (Sequence Number: 1769)] + Univ. 3′ |
| | CGTACGACACCCGTCGCATTGGTATTCT | Motif |
| | CGGGTCTCTACGTGGGGGCCCGTTTTTT | [CGGGTCTCTACGTGGGGGCCCG |
| | T (SEQ ID NO: 1113) | (Sequence Number: 1851)], and |
| | | transcription adaptations |
| 1114 | GCTTCTCCAATGCGACGGGTGGTTTTAG | pegRNA*3 (TGG-to-TCG PAM |
| | AGCTAGAAATAGCAAGTTAAAATAAGG | silencing edit); contains gRNA core |
| | CTAGTCCGTTATCAACTTGAAAAAGTGG | SEQ ID NO: 1854, Linker [TTAATC |
| | CACCGAGTCGGTGCTCGAAGGGGCTGC | (Sequence Number: 1770)] + Univ. 3′ |
| | GTACGACACCCGTCGCATTGGTTAATCG | Motif |
| | CGGCACCGTCCGCCCAAACGGTTTTTTT | [GCGGCACCGTCCGCCCAAACGG |
| | (SEQ ID NO: 1114) | (Sequence Number: 1852)], and |
| | | transcription adaptations |
| 1115 | GCTTCTCCAATGCGACGGGTGGTTTAAG | pegRNA*3 (TGG-to-TCG PAM |
| | AGCTAGAAATAGCAAGTTTAAATAAGG | silencing edit); contains gRNA core |
| | CTAGTCCGTTATCAACTTGAAAAAGTGG | SEQ ID NO: 1855, Linker [TTAATC |
| | CACCGAGTCGGTGCTCGAAGGGGCTGC | (Sequence Number: 1770)] + Univ. 3′ |
| | GTACGACACCCGTCGCATTGGTTAATCG | Motif |
| | CGGCACCGTCCGCCCAAACGGTTTTTTT | [GCGGCACCGTCCGCCCAAACGG |
| | (SEQ ID NO: 1115) | (Sequence Number: 1852)], and |
| | | transcription adaptations |
| 1116 | GCTTCTCCAATGCGACGGGTGGTTTAAG | pegRNA*3 (TGG-to-TCG PAM |
| | AGCTAGAAATAGCAAGTTTAAATAAGG | silencing edit); contains gRNA core |
| | CTAGTCCGTTATCAGCGTGAAAACGCG | SEQ ID NO: 1856, Linker [TTAATC |
| | GCACCGAGTCGGTGCTCGAAGGGGCTG | (Sequence Number: 1770)] + Univ. 3′ |
| | CGTACGACACCCGTCGCATTGGTTAATC | Motif |
| | GCGGCACCGTCCGCCCAAACGGTTTTTT | [GCGGCACCGTCCGCCCAAACGG |
| | T (SEQ ID NO: 1116) | (Sequence Number: 1852)], and |
| | | transcription adaptations |
| 1117 | GCTTCTCCAATGCGACGGGTGGTTTTAG | pegRNA*3 (TGG-to-TCG PAM |
| | AGCTAGAAATAGCAAGTTAAAATAAGG | silencing edit); contains gRNA core |
| | CTAGTCCGTTATCAACTTGAAAAAGTGG | SEQ ID NO: 1854, Linker [TTATCT |
| | CACCGAGTCGGTGCTCGAAGGGGCTGC | (Sequence Number: 1771)] + Univ. 3′ |
| | GTACGACACCCGTCGCATTGGTTATCTG | Motif |
| | CGGCACCGTCCGCCCAAACGGTTTTTTT | [GCGGCACCGTCCGCCCAAACGG |
| | (SEQ ID NO: 1117) | (Sequence Number: 1852)], and |
| | | transcription adaptations |
| 1118 | GCTTCTCCAATGCGACGGGTGGTTTAAG | pegRNA*3 (TGG-to-TCG PAM |
| | AGCTAGAAATAGCAAGTTTAAATAAGG | silencing edit); contains gRNA core |
| | CTAGTCCGTTATCAACTTGAAAAAGTGG | SEQ ID NO: 1855, Linker [TTATCT |
| | CACCGAGTCGGTGCTCGAAGGGGCTGC | (Sequence Number: 1771)] + Univ. 3′ |
| | GTACGACACCCGTCGCATTGGTTATCTG | Motif |
| | CGGCACCGTCCGCCCAAACGGTTTTTTT | [GCGGCACCGTCCGCCCAAACGG |
| | (SEQ ID NO: 1118) | (Sequence Number: 1852)], and |
| | | transcription adaptations |
| 1119 | GCTTCTCCAATGCGACGGGTGGTTTAAG | pegRNA*3 (TGG-to-TCG PAM |
| | AGCTAGAAATAGCAAGTTTAAATAAGG | silencing edit); contains gRNA core |
| | CTAGTCCGTTATCAGCGTGAAAACGCG | SEQ ID NO: 1856, Linker [TTATCT |
| | GCACCGAGTCGGTGCTCGAAGGGGCTG | (Sequence Number: 1771)] + Univ. 3′ |
| | CGTACGACACCCGTCGCATTGGTTATCT | Motif |
| | GCGGCACCGTCCGCCCAAACGGTTTTTT | [GCGGCACCGTCCGCCCAAACGG |
| | T (SEQ ID NO: 1119) | (Sequence Number: 1852)], and |
| | | transcription adaptations |
| 1120 | GCTTCTCCAATGCGACGGGTGGTTTTAG | pegRNA*3 (TGG-to-TCG PAM |
| | AGCTAGAAATAGCAAGTTAAAATAAGG | silencing edit); contains gRNA core |
| | CTAGTCCGTTATCAACTTGAAAAAGTGG | SEQ ID NO: 1854, Linker |
| | CACCGAGTCGGTGCTCGAAGGGGCTGC | [AACATTGA (Sequence Number: |
| | GTACGACACCCGTCGCATAACATTGAC | 1728)] + Univ. 3′ Motif |
| | GCGTCTCTACGTGGGGGCGCGTTTTTTT | [CGCGTCTCTACGTGGGGGCGCG |
| | (SEQ ID NO: 1120) | (Sequence Number: 1850)], and |
| | | transcription adaptations |
| 1121 | CTTCTCCAATGCGACGGGTGGTTTTAGA | pegRNA; contains gRNA core SEQ ID |
| | GCTAGAAATAGCAAGTTAAAATAAGGC | NO: 1854, and Linker [AACATTGA |
| | TAGTCCGTTATCAACTTGAAAAAGTGGC | (Sequence Number: 1728)] + Univ. 3′ |
| | ACCGAGTCGGTGCGTACTCGAAGGGGC | Motif |
| | TGCGTACCACACCCGTCGCATTGGAGA | [CGCGTCTCTACGTGGGGGCGCG |
| | ACATTGACGCGTCTCTACGTGGGGGCG | (Sequence Number: 1850)] |
| | CG (SEQ ID NO: 1121) | |
| 1122 | CTTCTCCAATGCGACGGGTGGTTTTAGA | pegRNA; contains gRNA core SEQ ID |
| | GCTAGAAATAGCAAGTTAAAATAAGGC | NO: 1854, and Linker [AACATTGA |
| | TAGTCCGTTATCAACTTGAAAAAGTGGC | (Sequence Number: 1728)] + Univ. 3′ |
| | ACCGAGTCGGTGCGGGTACTCGAAGGG | Motif |
| | GCTGCGTACCACACCCGTCGCATTGGA | [CGCGTCTCTACGTGGGGGCGCG |
| | ACATTGACGCGTCTCTACGTGGGGGCG | (Sequence Number: 1850)] |
| | CG (SEQ ID NO: 1122) | |
| 1123 | CTTCTCCAATGCGACGGGTGGTTTTAGA | pegRNA; contains gRNA core SEQ ID |
| | GCTAGAAATAGCAAGTTAAAATAAGGC | NO: 1854, and Linker [AACATTGA |
| | TAGTCCGTTATCAACTTGAAAAAGTGGC | (Sequence Number: 1728)] + Univ. 3′ |
| | ACCGAGTCGGTGCGTGGGTACTCGAAG | Motif |
| | GGGCTGCGTACCACACCCGTCGCATTA | [CGCGTCTCTACGTGGGGGCGCG |
| | ACATTGACGCGTCTCTACGTGGGGGCG | (Sequence Number: 1850)] |
| | CG (SEQ ID NO: 1123) | |
| 1124 | GCTTCTCCAATGCGACGGGTGGTTTTAG | pegRNA*1 (TGG-to-TAG PAM |
| | AGCTAGAAATAGCAAGTTAAAATAAGG | silencing edit); contains gRNA core |
| | CTAGTCCGTTATCAACTTGAAAAAGTGG | SEQ ID NO: 1854, Linker |
| | CACCGAGTCGGTGCTCGAAGGGGCTGC | [AACATTGA (Sequence Number: |
| | GTACTACACCCGTCGCATTAACATTGAC | 1728)] + Univ. 3′ Motif |
| | GCGTCTCTACGTGGGGGCGCGTTTTTTT | [CGCGTCTCTACGTGGGGGCGCG |
| | (SEQ ID NO: 1124) | (Sequence Number: 1850)], and |
| | | transcription adaptations |
| 1125 | GCTTCTCCAATGCGACGGGTGGTTTTAG | pegRNA*1 (TGG-to-TAG PAM |
| | AGCTAGAAATAGCAAGTTAAAATAAGG | silencing edit); contains gRNA core |
| | CTAGTCCGTTATCAACTTGAAAAAGTGG | SEQ ID NO: 1854, Linker |
| | CACCGAGTCGGTGCGAAGGGGCTGCGT | [AACATTGA (Sequence Number: |
| | ACTACACCCGTCGCATTGGAACATTGAC | 1728)] + Univ. 3′ Motif |
| | GCGTCTCTACGTGGGGGCGCGTTTTTTT | [CGCGTCTCTACGTGGGGGCGCG |
| | (SEQ ID NO: 1125) | (Sequence Number: 1850)], and |
| | | transcription adaptations |
| 1126 | GCTTCTCCAATGCGACGGGTGGTTTAAG | pegRNA*3 (TGG-to-TCG PAM |
| | AGCGGGGAAATCCGCAAGTTTAAATAA | silencing edit); contains gRNA core |
| | GGCTAGTCCGTTATCAGCGTGAAAACG | SEQ ID NO: 1857, Linker [TACCAT |
| | CGGCACCGAGTCGGTGCTCGAAGGGGC | (Sequence Number: 1768)] + Univ. 3′ |
| | TGCGTACGACACCCGTCGCATTGGTACC | Motif |
| | ATCGGGTCTCTACGTGGGGGCCCGTTTT | [CGGGTCTCTACGTGGGGGCCCG |
| | TTT (SEQ ID NO: 1126) | (Sequence Number: 1851)], and |
| | | transcription adaptations |
| 1127 | GCTTCTCCAATGCGACGGGTGGTTTAAG | pegRNA*3 (TGG-to-TCG PAM |
| | AGCGGGGAAATCCGCAAGTTTAAATAA | silencing edit); contains gRNA core |
| | GGCTAGTCCGTTATCAGCGTGAAAACG | SEQ ID NO: 1857, Linker [TATTCT |
| | CGGCACCGAGTCGGTGCTCGAAGGGGC | (Sequence Number: 1769)] + Univ. 3′ |
| | TGCGTACGACACCCGTCGCATTGGTATT | Motif |
| | CTCGGGTCTCTACGTGGGGGCCCGTTTT | [CGGGTCTCTACGTGGGGGCCCG |
| | TTT (SEQ ID NO: 1127) | (Sequence Number: 1851)], and |
| | | transcription adaptations |
| 1128 | GCTTCTCCAATGCGACGGGTGGTTTAAG | pegRNA*3 (TGG-to-TCG PAM |
| | AGCGGGGAAATCCGCAAGTTTAAATAA | silencing edit); contains gRNA core |
| | GGCTAGTCCGTTATCAGCGTGAAAACG | SEQ ID NO: 1857, Linker [TTAATC |
| | CGGCACCGAGTCGGTGCTCGAAGGGGC | (Sequence Number: 1770)] + Univ. 3′ |
| | TGCGTACGACACCCGTCGCATTGGTTAA | Motif |
| | TCGCGGCACCGTCCGCCCAAACGGTTTT | [GCGGCACCGTCCGCCCAAACGG |
| | TTT (SEQ ID NO: 1128) | (Sequence Number: 1852)], and |
| | | transcription adaptations |
| 1129 | GCTTCTCCAATGCGACGGGTGGTTTAAG | pegRNA*3 (TGG-to-TCG PAM |
| | AGCGGGGAAATCCGCAAGTTTAAATAA | silencing edit); contains gRNA core |
| | GGCTAGTCCGTTATCAGCGTGAAAACG | SEQ ID NO: 1857, Linker [TTATCT |
| | CGGCACCGAGTCGGTGCTCGAAGGGGC | (Sequence Number: 1771)] + Univ. 3′ |
| | TGCGTACGACACCCGTCGCATTGGTTAT | Motif |
| | CTGCGGCACCGTCCGCCCAAACGGTTTT | [GCGGCACCGTCCGCCCAAACGG |
| | TTT (SEQ ID NO: 1129) | (Sequence Number: 1852)], and |
| | | transcription adaptations |
| 1130 | GCTTCTCCAATGCGACGGGTGGTTTTAG | pegRNA*1 (TGG-to-TAG PAM |
| | AGCTAGAAATAGCAAGTTAAAATAAGG | silencing edit); contains gRNA core |
| | CTAGTCCGTTATCAACTTGAAAAAGTGG | SEQ ID NO: 1854, Linker |
| | CACCGAGTCGGTGCTCGAAGGGGCTGC | [AACATTGA (Sequence Number: |
| | GTACTACACCCGTCGCATTGAACATTGA | 1728)] + Univ. 3′ Motif |
| | CGCGTCTCTACGTGGGGGCGCGTTTTTT | [CGCGTCTCTACGTGGGGGCGCG |
| | T (SEQ ID NO: 1130) | (Sequence Number: 1850)], and |
| | | transcription adaptations |
| 1131 | CTTCTCCAATGCGACGGGTGGTTTTAGA | pegRNA; contains gRNA core SEQ ID |
| | GCTAGAAATAGCAAGTTAAAATAAGGC | NO: 1854, and Linker [AACATTGA |
| | TAGTCCGTTATCAACTTGAAAAAGTGGC | (Sequence Number: 1728)] + Univ. 3′ |
| | ACCGAGTCGGTGCGGGTACTCGAAGGG | Motif |
| | GCTGCGTACCACACCCGTCGCATTGGA | [CGCGTCTCTACGTGGGGGCGCG |
| | GAACATTGACGCGTCTCTACGTGGGGG | (Sequence Number: 1850)] |
| | CGCG (SEQ ID NO: 1131) | |
| 1132 | CTTCTCCAATGCGACGGGTGGTTTTAGA | pegRNA; contains gRNA core SEQ ID |
| | GCTAGAAATAGCAAGTTAAAATAAGGC | NO: 1854, and Linker [AACATTGA |
| | TAGTCCGTTATCAACTTGAAAAAGTGGC | (Sequence Number: 1728)] + Univ. 3′ |
| | ACCGAGTCGGTGCGTGGGTACTCGAAG | Motif |
| | GGGCTGCGTACCACACCCGTCGCATTG | [CGCGTCTCTACGTGGGGGCGCG |
| | GAACATTGACGCGTCTCTACGTGGGGG | (Sequence Number: 1850)] |
| | CGCG (SEQ ID NO: 1132) | |
| 1133 | GCTTCTCCAATGCGACGGGTGGTTTTAG | pegRNA*3 (TGG-to-TCG PAM |
| | AGCTAGAAATAGCAAGTTAAAATAAGG | silencing edit); contains gRNA core |
| | CTAGTCCGTTATCAACTTGAAAAAGTGG | SEQ ID NO: 1854, Linker |
| | CACCGAGTCGGTGCTCGAAGGGGCTGC | [AACATTGA (Sequence Number: |
| | GTACGACACCCGTCGCATTGGAACATT | 1728)] + Univ. 3′ Motif |
| | GACGCGTCTCTACGTGGGGGCGCGTTTT | [CGCGTCTCTACGTGGGGGCGCG |
| | TTT (SEQ ID NO: 1133) | (Sequence Number: 1850)], and |
| | | transcription adaptations |
| 1134 | GCTTCTCCAATGCGACGGGTGGTTTTAG | pegRNA*1 (TGG-to-TAG PAM |
| | AGCTAGAAATAGCAAGTTAAAATAAGG | silencing edit); contains gRNA core |
| | CTAGTCCGTTATCAACTTGAAAAAGTGG | SEQ ID NO: 1854, Linker |
| | CACCGAGTCGGTGCTCGAAGGGGCTGC | [AACATTGA (Sequence Number: |
| | GTACTACACCCGTCGCATTGGAAACATT | 1728)] + Univ. 3′ Motif |
| | GACGCGTCTCTACGTGGGGGCGCGTTTT | [CGCGTCTCTACGTGGGGGCGCG |
| | TTT (SEQ ID NO: 1134) | (Sequence Number: 1850)], and |
| | | transcription adaptations |
| 1135 | CTTCTCCAATGCGACGGGTGGTTTTAGA | pegRNA; contains gRNA core SEQ ID |
| | GCTAGAAATAGCAAGTTAAAATAAGGC | NO: 1854, and Linker [AACATTGA |
| | TAGTCCGTTATCAACTTGAAAAAGTGGC | (Sequence Number: 1728)] + Univ. 3′ |
| | ACCGAGTCGGTGCGTGGGTACTCGAAG | Motif |
| | GGGCTGCGTACCACACCCGTCGCATTG | [CGCGTCTCTACGTGGGGGCGCG |
| | GAGAACATTGACGCGTCTCTACGTGGG | (Sequence Number: 1850)] |
| | GGCGCG (SEQ ID NO: 1135) | |
| 1136 | GCTTCTCCAATGCGACGGGTGGTTTTAG | pegRNA*3 (TGG-to-TCG PAM |
| | AGCTAGAAATAGCAAGTTAAAATAAGG | silencing edit); contains gRNA core |
| | CTAGTCCGTTATCAACTTGAAAAAGTGG | SEQ ID NO: 1854, Linker |
| | CACCGAGTCGGTGCTCGAAGGGGCTGC | [AACATTGA (Sequence Number: |
| | GTACGACACCCGTCGCATTGGAGAAAA | 1728)] + Univ. 3′ Motif |
| | CATTGACGCGTCTCTACGTGGGGGCGC | [CGCGTCTCTACGTGGGGGCGCG |
| | GTTTTTTT (SEQ ID NO: 1136) | (Sequence Number: 1850)], and |
| | | transcription adaptations |
| 1137 | GCTTCTCCAATGCGACGGGTGGTTTAAG | pegRNA*3 (TGG-to-TCG PAM |
| | AGCTATGCTGGAAACAGCATAGCAAGT | silencing edit); contains gRNA core |
| | TTAAATAAGGCTAGTCCGTTATCAACTT | SEQ ID NO: 1858, Linker [TACCAT |
| | GAAAAAGTGGCACCGAGTCGGTGCTCG | (Sequence Number: 1768)] + Univ. 3′ |
| | AAGGGGCTGCGTACGACACCCGTCGCA | Motif |
| | TTGGTACCATCGGGTCTCTACGTGGGGG | [CGGGTCTCTACGTGGGGGCCCG |
| | CCCGTTTTTTT (SEQ ID NO: 1137) | (Sequence Number: 1851)], and |
| | | transcription adaptations |
| 1138 | GCTTCTCCAATGCGACGGGTGGTTTAAG | pegRNA*3 (TGG-to-TCG PAM |
| | AGCTATGCTGGAAACAGCATAGCAAGT | silencing edit); contains gRNA core |
| | TTAAATAAGGCTAGTCCGTTATCAGCGT | SEQ ID NO: 1859, Linker [TACCAT |
| | GAAAACGCGGCACCGAGTCGGTGCTCG | (Sequence Number: 1768)] + Univ. 3′ |
| | AAGGGGCTGCGTACGACACCCGTCGCA | Motif |
| | TTGGTACCATCGGGTCTCTACGTGGGGG | [CGGGTCTCTACGTGGGGGCCCG |
| | CCCGTTTTTTT (SEQ ID NO: 1138) | (Sequence Number: 1851)], and |
| | | transcription adaptations |
| 1139 | GCTTCTCCAATGCGACGGGTGGTTTAAG | pegRNA*3 (TGG-to-TCG PAM |
| | AGCTATGCTGGAAACAGCATAGCAAGT | silencing edit); contains gRNA core |
| | TTAAATAAGGCTAGTCCGTTATCAACTT | SEQ ID NO: 1858, Linker [TATTCT |
| | GAAAAAGTGGCACCGAGTCGGTGCTCG | (Sequence Number: 1769)] + Univ. 3′ |
| | AAGGGGCTGCGTACGACACCCGTCGCA | Motif |
| | TTGGTATTCTCGGGTCTCTACGTGGGGG | [CGGGTCTCTACGTGGGGGCCCG |
| | CCCGTTTTTTT (SEQ ID NO: 1139) | (Sequence Number: 1851)], and |
| | | transcription adaptations |
| 1140 | GCTTCTCCAATGCGACGGGTGGTTTAAG | pegRNA*3 (TGG-to-TCG PAM |
| | AGCTATGCTGGAAACAGCATAGCAAGT | silencing edit); contains gRNA core |
| | TTAAATAAGGCTAGTCCGTTATCAGCGT | SEQ ID NO: 1859, Linker [TATTCT |
| | GAAAACGCGGCACCGAGTCGGTGCTCG | (Sequence Number: 1769)] + Univ. 3′ |
| | AAGGGGCTGCGTACGACACCCGTCGCA | Motif |
| | TTGGTATTCTCGGGTCTCTACGTGGGGG | [CGGGTCTCTACGTGGGGGCCCG |
| | CCCGTTTTTTT (SEQ ID NO: 1140) | (Sequence Number: 1851)], and |
| | | transcription adaptations |
| 1141 | GCTTCTCCAATGCGACGGGTGGTTTAAG | pegRNA*3 (TGG-to-TCG PAM |
| | AGCTATGCTGGAAACAGCATAGCAAGT | silencing edit); contains gRNA core |
| | TTAAATAAGGCTAGTCCGTTATCAACTT | SEQ ID NO: 1858, Linker [TTAATC |
| | GAAAAAGTGGCACCGAGTCGGTGCTCG | (Sequence Number: 1770)] + Univ. 3′ |
| | AAGGGGCTGCGTACGACACCCGTCGCA | Motif |
| | TTGGTTAATCGCGGCACCGTCCGCCCAA | [GCGGCACCGTCCGCCCAAACGG |
| | ACGGTTTTTTT (SEQ ID NO: 1141) | (Sequence Number: 1852)], and |
| | | transcription adaptations |
| 1142 | GCTTCTCCAATGCGACGGGTGGTTTAAG | pegRNA*3 (TGG-to-TCG PAM |
| | AGCTATGCTGGAAACAGCATAGCAAGT | silencing edit); contains gRNA core |
| | TTAAATAAGGCTAGTCCGTTATCAGCGT | SEQ ID NO: 1859, Linker [TTAATC |
| | GAAAACGCGGCACCGAGTCGGTGCTCG | (Sequence Number: 1770)] + Univ. 3′ |
| | AAGGGGCTGCGTACGACACCCGTCGCA | Motif |
| | TTGGTTAATCGCGGCACCGTCCGCCCAA | [GCGGCACCGTCCGCCCAAACGG |
| | ACGGTTTTTTT (SEQ ID NO: 1142) | (Sequence Number: 1852)], and |
| | | transcription adaptations |
| 1143 | GCTTCTCCAATGCGACGGGTGGTTTAAG | pegRNA*3 (TGG-to-TCG PAM |
| | AGCTATGCTGGAAACAGCATAGCAAGT | silencing edit); contains gRNA core |
| | TTAAATAAGGCTAGTCCGTTATCAACTT | SEQ ID NO: 1858, Linker [TTATCT |
| | GAAAAAGTGGCACCGAGTCGGTGCTCG | (Sequence Number: 1771)] + Univ. 3′ |
| | AAGGGGCTGCGTACGACACCCGTCGCA | Motif |
| | TTGGTTATCTGCGGCACCGTCCGCCCAA | [GCGGCACCGTCCGCCCAAACGG |
| | ACGGTTTTTTT (SEQ ID NO: 1143) | (Sequence Number: 1852)], and |
| | | transcription adaptations |
| 1144 | GCTTCTCCAATGCGACGGGTGGTTTAAG | pegRNA*3 (TGG-to-TCG PAM |
| | AGCTATGCTGGAAACAGCATAGCAAGT | silencing edit); contains gRNA core |
| | TTAAATAAGGCTAGTCCGTTATCAGCGT | SEQ ID NO: 1859, Linker [TTATCT |
| | GAAAACGCGGCACCGAGTCGGTGCTCG | (Sequence Number: 1771)] + Univ. 3′ |
| | AAGGGGCTGCGTACGACACCCGTCGCA | Motif |
| | TTGGTTATCTGCGGCACCGTCCGCCCAA | [GCGGCACCGTCCGCCCAAACGG |
| | ACGGTTTTTTT (SEQ ID NO: 1144) | (Sequence Number: 1852)], and |
| | | transcription adaptations |
| 1145 | GCTTCTCCAATGCGACGGGTGGTTTTAG | pegRNA*3 (TGG-to-TCG PAM |
| | AGCTAGAAATAGCAAGTTAAAATAAGG | silencing edit); contains gRNA core |
| | CTAGTCCGTTATCAACTTGAAAAAGTGG | SEQ ID NO: 1854, Linker [CCAGCT |
| | CACCGAGTCGGTGCTCGAAGGGGCTGC | (Sequence Number: 1772)] + Univ. 3′ |
| | GTACGACACCCGTCGCATTGGCCAGCTC | Motif |
| | GCGGTTCTATCTAGTTACGCGTTAAACC | [CGCGGTTCTATCTAGTTACGCGT |
| | AACTAGAATTTTTTT (SEQ ID NO: 1145) | TAAACCAACTAGAA (Sequence |
| | | Number: 1853)], and transcription |
| | | adaptations |
| 1146 | GCTTCTCCAATGCGACGGGTGGTTTAAG | pegRNA*3 (TGG-to-TCG PAM |
| | AGCTAGAAATAGCAAGTTTAAATAAGG | silencing edit); contains gRNA core |
| | CTAGTCCGTTATCAACTTGAAAAAGTGG | SEQ ID NO: 1855, Linker [CCAGCT |
| | CACCGAGTCGGTGCTCGAAGGGGCTGC | (Sequence Number: 1772)] + Univ. 3′ |
| | GTACGACACCCGTCGCATTGGCCAGCTC | Motif |
| | GCGGTTCTATCTAGTTACGCGTTAAACC | [CGCGGTTCTATCTAGTTACGCGT |
| | AACTAGAATTTTTTT (SEQ ID NO: 1146) | TAAACCAACTAGAA (Sequence |
| | | Number: 1853)], and transcription |
| | | adaptations |
| 1147 | GCTTCTCCAATGCGACGGGTGGTTTAAG | pegRNA*3 (TGG-to-TCG PAM |
| | AGCTAGAAATAGCAAGTTTAAATAAGG | silencing edit); contains gRNA core |
| | CTAGTCCGTTATCAGCGTGAAAACGCG | SEQ ID NO: 1856, Linker [CCAGCT |
| | GCACCGAGTCGGTGCTCGAAGGGGCTG | (Sequence Number: 1772)] + Univ. 3′ |
| | CGTACGACACCCGTCGCATTGGCCAGCT | Motif |
| | CGCGGTTCTATCTAGTTACGCGTTAAAC | [CGCGGTTCTATCTAGTTACGCGT |
| | CAACTAGAATTTTTTT (SEQ ID NO: 1147) | TAAACCAACTAGAA (Sequence |
| | | Number: 1853)], and transcription |
| | | adaptations |
| 1148 | GCTTCTCCAATGCGACGGGTGGTTTTAG | pegRNA*3 (TGG-to-TCG PAM |
| | AGCTAGAAATAGCAAGTTAAAATAAGG | silencing edit); contains gRNA core |
| | CTAGTCCGTTATCAACTTGAAAAAGTGG | SEQ ID NO: 1854, Linker [CCTGCC |
| | CACCGAGTCGGTGCTCGAAGGGGCTGC | (Sequence Number: 1773)] + Univ. 3′ |
| | GTACGACACCCGTCGCATTGGCCTGCCC | Motif |
| | GCGGTTCTATCTAGTTACGCGTTAAACC | [CGCGGTTCTATCTAGTTACGCGT |
| | AACTAGAATTTTTTT (SEQ ID NO: 1148) | TAAACCAACTAGAA (Sequence |
| | | Number: 1853)], and transcription |
| | | adaptations |
| 1149 | GCTTCTCCAATGCGACGGGTGGTTTAAG | pegRNA*3 (TGG-to-TCG PAM |
| | AGCTAGAAATAGCAAGTTTAAATAAGG | silencing edit); contains gRNA core |
| | CTAGTCCGTTATCAACTTGAAAAAGTGG | SEQ ID NO: 1855, Linker [CCTGCC |
| | CACCGAGTCGGTGCTCGAAGGGGCTGC | (Sequence Number: 1773)] + Univ. 3′ |
| | GTACGACACCCGTCGCATTGGCCTGCCC | Motif |
| | GCGGTTCTATCTAGTTACGCGTTAAACC | [CGCGGTTCTATCTAGTTACGCGT |
| | AACTAGAATTTTTTT (SEQ ID NO: 1149) | TAAACCAACTAGAA (Sequence |
| | | Number: 1853)], and transcription |
| | | adaptations |
| 1150 | GCTTCTCCAATGCGACGGGTGGTTTAAG | pegRNA*3 (TGG-to-TCG PAM |
| | AGCTAGAAATAGCAAGTTTAAATAAGG | silencing edit); contains gRNA core |
| | CTAGTCCGTTATCAGCGTGAAAACGCG | SEQ ID NO: 1856, Linker [CCTGCC |
| | GCACCGAGTCGGTGCTCGAAGGGGCTG | (Sequence Number: 1773)] + Univ. 3′ |
| | CGTACGACACCCGTCGCATTGGCCTGCC | Motif |
| | CGCGGTTCTATCTAGTTACGCGTTAAAC | [CGCGGTTCTATCTAGTTACGCGT |
| | CAACTAGAATTTTTTT (SEQ ID NO: 1150) | TAAACCAACTAGAA (Sequence |
| | | Number: 1853)], and transcription |
| | | adaptations |
| 1151 | GCTTCTCCAATGCGACGGGTGGTTTAAG | pegRNA*3 (TGG-to-TCG PAM |
| | AGCGGGGAAATCCGCAAGTTTAAATAA | silencing edit); contains gRNA core |
| | GGCTAGTCCGTTATCAGCGTGAAAACG | SEQ ID NO: 1857, Linker [CCAGCT |
| | CGGCACCGAGTCGGTGCTCGAAGGGGC | (Sequence Number: 1772)] + Univ. 3′ |
| | TGCGTACGACACCCGTCGCATTGGCCA | Motif |
| | GCTCGCGGTTCTATCTAGTTACGCGTTA | [CGCGGTTCTATCTAGTTACGCGT |
| | AACCAACTAGAATTTTTTT (SEQ ID NO: | TAAACCAACTAGAA (Sequence |
| | 1151) | Number: 1853)], and transcription |
| | | adaptations |
| 1152 | GCTTCTCCAATGCGACGGGTGGTTTAAG | pegRNA*3 (TGG-to-TCG PAM |
| | AGCGGGGAAATCCGCAAGTTTAAATAA | silencing edit); contains gRNA core |
| | GGCTAGTCCGTTATCAGCGTGAAAACG | SEQ ID NO: 1857, Linker [CCTGCC |
| | CGGCACCGAGTCGGTGCTCGAAGGGGC | (Sequence Number: 1773)] + Univ. 3′ |
| | TGCGTACGACACCCGTCGCATTGGCCTG | Motif |
| | CCCGCGGTTCTATCTAGTTACGCGTTAA | [CGCGGTTCTATCTAGTTACGCGT |
| | ACCAACTAGAATTTTTTT (SEQ ID NO: | TAAACCAACTAGAA (Sequence |
| | 1152) | Number: 1853)], and transcription |
| | | adaptations |
| 1153 | GCTTCTCCAATGCGACGGGTGGTTTAAG | pegRNA*3 (TGG-to-TCG PAM |
| | AGCTATGCTGGAAACAGCATAGCAAGT | silencing edit); contains gRNA core |
| | TTAAATAAGGCTAGTCCGTTATCAACTT | SEQ ID NO: 1858, Linker [CCAGCT |
| | GAAAAAGTGGCACCGAGTCGGTGCTCG | (Sequence Number: 1772)] + Univ. 3′ |
| | AAGGGGCTGCGTACGACACCCGTCGCA | Motif |
| | TTGGCCAGCTCGCGGTTCTATCTAGTTA | [CGCGGTTCTATCTAGTTACGCGT |
| | CGCGTTAAACCAACTAGAATTTTTTT | TAAACCAACTAGAA (Sequence |
| | (SEQ ID NO: 1153) | Number: 1853)], and transcription |
| | | adaptations |
| 1154 | GCTTCTCCAATGCGACGGGTGGTTTAAG | pegRNA*3 (TGG-to-TCG PAM |
| | AGCTATGCTGGAAACAGCATAGCAAGT | silencing edit); contains gRNA core |
| | TTAAATAAGGCTAGTCCGTTATCAGCGT | SEQ ID NO: 1859, Linker [CCAGCT |
| | GAAAACGCGGCACCGAGTCGGTGCTCG | (Sequence Number: 1772)] + Univ. 3′ |
| | AAGGGGCTGCGTACGACACCCGTCGCA | Motif |
| | TTGGCCAGCTCGCGGTTCTATCTAGTTA | [CGCGGTTCTATCTAGTTACGCGT |
| | CGCGTTAAACCAACTAGAATTTTTTT | TAAACCAACTAGAA (Sequence |
| | (SEQ ID NO: 1154) | Number: 1853)], and transcription |
| | | adaptations |
| 1155 | GCTTCTCCAATGCGACGGGTGGTTTAAG | pegRNA*3 (TGG-to-TCG PAM |
| | AGCTATGCTGGAAACAGCATAGCAAGT | silencing edit); contains gRNA core |
| | TTAAATAAGGCTAGTCCGTTATCAACTT | SEQ ID NO: 1858, Linker [CCTGCC |
| | GAAAAAGTGGCACCGAGTCGGTGCTCG | (Sequence Number: 1773)] + Univ. 3′ |
| | AAGGGGCTGCGTACGACACCCGTCGCA | Motif |
| | TTGGCCTGCCCGCGGTTCTATCTAGTTA | [CGCGGTTCTATCTAGTTACGCGT |
| | CGCGTTAAACCAACTAGAATTTTTTT | TAAACCAACTAGAA (Sequence |
| | (SEQ ID NO: 1155) | Number: 1853)], and transcription |
| | | adaptations |
| 1156 | GCTTCTCCAATGCGACGGGTGGTTTAAG | pegRNA*3 (TGG-to-TCG PAM |
| | AGCTATGCTGGAAACAGCATAGCAAGT | silencing edit); contains gRNA core |
| | TTAAATAAGGCTAGTCCGTTATCAGCGT | SEQ ID NO: 1859, Linker [CCTGCC |
| | GAAAACGCGGCACCGAGTCGGTGCTCG | (Sequence Number: 1773)] + Univ. 3′ |
| | AAGGGGCTGCGTACGACACCCGTCGCA | Motif |
| | TTGGCCTGCCCGCGGTTCTATCTAGTTA | [CGCGGTTCTATCTAGTTACGCGT |
| | CGCGTTAAACCAACTAGAATTTTTTT | TAAACCAACTAGAA (Sequence |
| | (SEQ ID NO: 1156) | Number: 1853)], and transcription |
| | | adaptations |
| 1157 | GCGTACCACACCCGTCGCATGTTTTAGA | PE3 ngRNA (TGG PAM); contains |
| | GCTAGAAATAGCAAGTTAAAATAAGGC | gRNA core SEQ ID NO: 1854 |
| | TAGTCCGTTATCAACTTGAAAAAGTGGC | |
| | ACCGAGTCGGTGC (SEQ ID NO: 1157) | |
| 1158 | GCGTACTACACCCGTCGCATGTTTTAGA | PE3b* 1 ngRNA (TGG PAM); contains |
| | GCTAGAAATAGCAAGTTAAAATAAGGC | gRNA core SEQ ID NO: 1854 |
| | TAGTCCGTTATCAACTTGAAAAAGTGGC | |
| | ACCGAGTCGGTGC (SEQ ID NO: 1158) | |
| 1159 | GCGTACGACACCCGTCGCATGTTTTAGA | PE3b*3 ngRNA (TGG PAM); contains |
| | GCTAGAAATAGCAAGTTAAAATAAGGC | gRNA core SEQ ID NO: 1854 |
| | TAGTCCGTTATCAACTTGAAAAAGTGGC | |
| | ACCGAGTCGGTGC (SEQ ID NO: 1159) | |
| 1160 | GCGTACAACACCCGTCGCATGTTTTAGA | PE3b*2 ngRNA (TGG PAM); contains |
| | GCTAGAAATAGCAAGTTAAAATAAGGC | gRNA core SEQ ID NO: 1854 |
| | TAGTCCGTTATCAACTTGAAAAAGTGGC | |
| | ACCGAGTCGGTGC (SEQ ID NO: 1160) | |
| 1161 | AGTACTGTGGGTACTCGAAGGTTTTAGA | PE3 ngRNA (TGG PAM); contains |
| | GCTAGAAATAGCAAGTTAAAATAAGGC | gRNA core SEQ ID NO: 1854 |
| | TAGTCCGTTATCAACTTGAAAAAGTGGC | |
| | ACCGAGTCGGTGC (SEQ ID NO: 1161) | |
| 1162 | GCTCAGCCAGGTAGTACTGTGTTTTAGA | PE3 ngRNA (GGG PAM); contains |
| | GCTAGAAATAGCAAGTTAAAATAAGGC | gRNA core SEQ ID NO: 1854 |
| | TAGTCCGTTATCAACTTGAAAAAGTGGC | |
| | ACCGAGTCGGTGC (SEQ ID NO: 1162) | |
| 1163 | GGCTCAGCCAGGTAGTACTGGTTTTAGA | PE3 ngRNA (TGG PAM); contains |
| | GCTAGAAATAGCAAGTTAAAATAAGGC | gRNA core SEQ ID NO: 1854 |
| | TAGTCCGTTATCAACTTGAAAAAGTGGC | |
| | ACCGAGTCGGTGC (SEQ ID NO: 1163) | |
| 1164 | AGAACTGCCATGGCTCAGCCGTTTTAGA | PE3 ngRNA (AGG PAM); contains |
| | GCTAGAAATAGCAAGTTAAAATAAGGC | gRNA core SEQ ID NO: 1854 |
| | TAGTCCGTTATCAACTTGAAAAAGTGGC | |
| | ACCGAGTCGGTGC (SEQ ID NO: 1164) | |
| 1165 | GCCAGCATGGAGAACTGCCAGTTTTAG | PE3 ngRNA (TGG PAM); contains |
| | AGCTAGAAATAGCAAGTTAAAATAAGG | gRNA core SEQ ID NO: 1854 |
| | CTAGTCCGTTATCAACTTGAAAAAGTGG | |
| | CACCGAGTCGGTGC (SEQ ID NO: 1165) | |
| 1166 | AAACATGTAGGCGGCCAGCAGTTTTAG | PE3 ngRNA (TGG PAM); contains |
| | AGCTAGAAATAGCAAGTTAAAATAAGG | gRNA core SEQ ID NO: 1854 |
| | CTAGTCCGTTATCAACTTGAAAAAGTGG | |
| | CACCGAGTCGGTGC (SEQ ID NO: 1166) | |
| 1167 | GATCAGCAGAAACATGTAGGGTTTTAG | PE3 ngRNA (CGG PAM); contains |
| | AGCTAGAAATAGCAAGTTAAAATAAGG | gRNA core SEQ ID NO: 1854 |
| | CTAGTCCGTTATCAACTTGAAAAAGTGG | |
| | CACCGAGTCGGTGC (SEQ ID NO: 1167) | |
| 1168 | CACGATCAGCAGAAACATGTGTTTTAG | PE3 ngRNA (AGG PAM); contains |
| | AGCTAGAAATAGCAAGTTAAAATAAGG | gRNA core SEQ ID NO: 1854 |
| | CTAGTCCGTTATCAACTTGAAAAAGTGG | |
| | CACCGAGTCGGTGC (SEQ ID NO: 1168) | |
| 1169 | AGAGCGTGAGGAAGTTGATGGTTTTAG | PE3 ngRNA (GGG PAM); contains |
| | AGCTAGAAATAGCAAGTTAAAATAAGG | gRNA core SEQ ID NO: 1854 |
| | CTAGTCCGTTATCAACTTGAAAAAGTGG | |
| | CACCGAGTCGGTGC (SEQ ID NO: 1169) | |
| 1170 | GAGAACTGCCATGGCTCAGCCGTTTTAG | PE3 ngRNA (AGG PAM); contains |
| | AGCTAGAAATAGCAAGTTAAAATAAGG | gRNA core SEQ ID NO: 1854 |
| | CTAGTCCGTTATCAACTTGAAAAAGTGG | |
| | CACCGAGTCGGTGC (SEQ ID NO: 1170) | |
| 1171 | GCGTACCACACCCGTCGCATGTTTTAGA | PE3 ngRNA (TGG PAM); contains |
| | GCTAGAAATAGCAAGTTAAAATAAGGC | gRNA core SEQ ID NO: 1854, and |
| | TAGTCCGTTATCAACTTGAAAAAGTGGC | Linker [AACATTGA (Sequence |
| | ACCGAGTCGGTGCAACATTGACGCGTC | Number: 1728)] + Univ. 3′ Motif |
| | TCTACGTGGGGGCGCG (SEQ ID NO: | [CGCGTCTCTACGTGGGGGCGCG |
| | 1171) | (Sequence Number: 1850)] |
| 1172 | GCGTACTACACCCGTCGCATGTTTTAGA | PE3b* 1 ngRNA (TGG PAM); contains |
| | GCTAGAAATAGCAAGTTAAAATAAGGC | gRNA core SEQ ID NO: 1854, and |
| | TAGTCCGTTATCAACTTGAAAAAGTGGC | Linker [AACATTGA (Sequence |
| | ACCGAGTCGGTGCAACATTGACGCGTC | Number: 1728)] + Univ. 3′ Motif |
| | TCTACGTGGGGGCGCG (SEQ ID NO: | [CGCGTCTCTACGTGGGGGCGCG |
| | 1172) | (Sequence Number: 1850)] |
| 1173 | GCGTACGACACCCGTCGCATGTTTTAGA | PE3b*3 ngRNA (TGG PAM); contains |
| | GCTAGAAATAGCAAGTTAAAATAAGGC | gRNA core SEQ ID NO: 1854, and |
| | TAGTCCGTTATCAACTTGAAAAAGTGGC | Linker [AACATTGA (Sequence |
| | ACCGAGTCGGTGCAACATTGACGCGTC | Number: 1728)] + Univ. 3′ Motif |
| | TCTACGTGGGGGCGCG (SEQ ID NO: | [CGCGTCTCTACGTGGGGGCGCG |
| | 1173) | (Sequence Number: 1850)] |
| 1174 | GCGTACAACACCCGTCGCATGTTTTAGA | PE3b*2 ngRNA (TGG PAM); contains |
| | GCTAGAAATAGCAAGTTAAAATAAGGC | gRNA core SEQ ID NO: 1854, and |
| | TAGTCCGTTATCAACTTGAAAAAGTGGC | Linker [AACATTGA (Sequence |
| | ACCGAGTCGGTGCAACATTGACGCGTC | Number: 1728)] + Univ. 3′ Motif |
| | TCTACGTGGGGGCGCG (SEQ ID NO: | [CGCGTCTCTACGTGGGGGCGCG |
| | 1174) | (Sequence Number: 1850)] |
| 1175 | AGTACTGTGGGTACTCGAAGGTTTTAGA | PE3 ngRNA (TGG PAM); contains |
| | GCTAGAAATAGCAAGTTAAAATAAGGC | gRNA core SEQ ID NO: 1854, and |
| | TAGTCCGTTATCAACTTGAAAAAGTGGC | Linker [AACATTGA (Sequence |
| | ACCGAGTCGGTGCAACATTGACGCGTC | Number: 1728)] + Univ. 3′ Motif |
| | TCTACGTGGGGGCGCG (SEQ ID NO: | [CGCGTCTCTACGTGGGGGCGCG |
| | 1175) | (Sequence Number: 1850)] |
| 1176 | GCTCAGCCAGGTAGTACTGTGTTTTAGA | PE3 ngRNA (GGG PAM); contains |
| | GCTAGAAATAGCAAGTTAAAATAAGGC | gRNA core SEQ ID NO: 1854, and |
| | TAGTCCGTTATCAACTTGAAAAAGTGGC | Linker [AACATTGA (Sequence |
| | ACCGAGTCGGTGCAACATTGACGCGTC | Number: 1728)] + Univ. 3′ Motif |
| | TCTACGTGGGGGCGCG (SEQ ID NO: | [CGCGTCTCTACGTGGGGGCGCG |
| | 1176) | (Sequence Number: 1850)] |
| 1177 | GGCTCAGCCAGGTAGTACTGGTTTTAGA | PE3 ngRNA (TGG PAM); contains |
| | GCTAGAAATAGCAAGTTAAAATAAGGC | gRNA core SEQ ID NO: 1854, and |
| | TAGTCCGTTATCAACTTGAAAAAGTGGC | Linker [AACATTGA (Sequence |
| | ACCGAGTCGGTGCAACATTGACGCGTC | Number: 1728)] + Univ. 3′ Motif |
| | TCTACGTGGGGGCGCG (SEQ ID NO: | [CGCGTCTCTACGTGGGGGCGCG |
| | 1177) | (Sequence Number: 1850)] |
| 1178 | AGAACTGCCATGGCTCAGCCGTTTTAGA | PE3 ngRNA (AGG PAM); contains |
| | GCTAGAAATAGCAAGTTAAAATAAGGC | gRNA core SEQ ID NO: 1854, and |
| | TAGTCCGTTATCAACTTGAAAAAGTGGC | Linker [AACATTGA (Sequence |
| | ACCGAGTCGGTGCAACATTGACGCGTC | Number: 1728)] + Univ. 3′ Motif |
| | TCTACGTGGGGGCGCG (SEQ ID NO: | [CGCGTCTCTACGTGGGGGCGCG |
| | 1178) | (Sequence Number: 1850)] |
| 1179 | GCCAGCATGGAGAACTGCCAGTTTTAG | PE3 ngRNA (TGG PAM); contains |
| | AGCTAGAAATAGCAAGTTAAAATAAGG | gRNA core SEQ ID NO: 1854, and |
| | CTAGTCCGTTATCAACTTGAAAAAGTGG | Linker [AACATTGA (Sequence |
| | CACCGAGTCGGTGCAACATTGACGCGT | Number: 1728)] + Univ. 3′ Motif |
| | CTCTACGTGGGGGCGCG (SEQ ID NO: | [CGCGTCTCTACGTGGGGGCGCG |
| | 1179) | (Sequence Number: 1850)] |
| 1180 | AAACATGTAGGCGGCCAGCAGTTTTAG | PE3 ngRNA (TGG PAM); contains |
| | AGCTAGAAATAGCAAGTTAAAATAAGG | gRNA core SEQ ID NO: 1854, and |
| | CTAGTCCGTTATCAACTTGAAAAAGTGG | Linker [AACATTGA (Sequence |
| | CACCGAGTCGGTGCAACATTGACGCGT | Number: 1728)] + Univ. 3′ Motif |
| | CTCTACGTGGGGGCGCG (SEQ ID NO: | [CGCGTCTCTACGTGGGGGCGCG |
| | 1180) | (Sequence Number: 1850)] |
| 1181 | GATCAGCAGAAACATGTAGGGTTTTAG | PE3 ngRNA (CGG PAM); contains |
| | AGCTAGAAATAGCAAGTTAAAATAAGG | gRNA core SEQ ID NO: 1854, and |
| | CTAGTCCGTTATCAACTTGAAAAAGTGG | Linker [AACATTGA (Sequence |
| | CACCGAGTCGGTGCAACATTGACGCGT | Number: 1728)] + Univ. 3′ Motif |
| | CTCTACGTGGGGGCGCG (SEQ ID NO: | [CGCGTCTCTACGTGGGGGCGCG |
| | 1181) | (Sequence Number: 1850)] |
| 1182 | CACGATCAGCAGAAACATGTGTTTTAG | PE3 ngRNA (AGG PAM); contains |
| | AGCTAGAAATAGCAAGTTAAAATAAGG | gRNA core SEQ ID NO: 1854, and |
| | CTAGTCCGTTATCAACTTGAAAAAGTGG | Linker [AACATTGA (Sequence |
| | CACCGAGTCGGTGCAACATTGACGCGT | Number: 1728)] + Univ. 3′ Motif |
| | CTCTACGTGGGGGCGCG (SEQ ID NO: | [CGCGTCTCTACGTGGGGGCGCG |
| | 1182) | (Sequence Number: 1850)] |
| 1183 | AGAGCGTGAGGAAGTTGATGGTTTTAG | PE3 ngRNA (GGG PAM); contains |
| | AGCTAGAAATAGCAAGTTAAAATAAGG | gRNA core SEQ ID NO: 1854, and |
| | CTAGTCCGTTATCAACTTGAAAAAGTGG | Linker [AACATTGA (Sequence |
| | CACCGAGTCGGTGCAACATTGACGCGT | Number: 1728)] + Univ. 3′ Motif |
| | CTCTACGTGGGGGCGCG (SEQ ID NO: | [CGCGTCTCTACGTGGGGGCGCG |
| | 1183) | (Sequence Number: 1850)] |
| 1184 | GGCTCAGCCAGGTAGTACTGGTTTTAGA | PE3 ngRNA (TGG PAM); contains |
| | GCTAGAAATAGCAAGTTAAAATAAGGC | gRNA core SEQ ID NO: 1854, Linker |
| | TAGTCCGTTATCAACTTGAAAAAGTGGC | [AACATTGA (Sequence Number: |
| | ACCGAGTCGGTGCAACATTGACGCGTC | 1728)] + Univ. 3′ Motif |
| | TCTACGTGGGGGCGCGTTTTTTT (SEQ ID | [CGCGTCTCTACGTGGGGGCGCG |
| | NO: 1184) | (Sequence Number: 1850)], and |
| | | transcription adaptations |
| 1185 | GCGTACTACACCCGTCGCATGTTTTAGA | PE3b* 1 ngRNA (TGG PAM); contains |
| | GCTAGAAATAGCAAGTTAAAATAAGGC | gRNA core SEQ ID NO: 1854, Linker |
| | TAGTCCGTTATCAACTTGAAAAAGTGGC | [AACATTGA (Sequence Number: |
| | ACCGAGTCGGTGCAACATTGACGCGTC | 1728)] + Univ. 3′ Motif |
| | TCTACGTGGGGGCGCGTTTTTTT (SEQ ID | [CGCGTCTCTACGTGGGGGCGCG |
| | NO: 1185) | (Sequence Number: 1850)], and |
| | | transcription adaptations |
| 1186 | GAGAACTGCCATGGCTCAGCCGTTTTAG | PE3 ngRNA (AGG PAM); contains |
| | AGCTAGAAATAGCAAGTTAAAATAAGG | gRNA core SEQ ID NO: 1854, Linker |
| | CTAGTCCGTTATCAACTTGAAAAAGTGG | [AACATTGA (Sequence Number: |
| | CACCGAGTCGGTGCAACATTGACGCGT | 1728)] + Univ. 3′ Motif |
| | CTCTACGTGGGGGCGCGTTTTTTT (SEQ | [CGCGTCTCTACGTGGGGGCGCG |
| | ID NO: 1186) | (Sequence Number: 1850)], and |
| | | transcription adaptations |

TABLE 4

| Sequence | | |
|---|---|---|
| Number | Sequence | Description |
| 1187 | GCCCTTCTCCAATGCGA (SEQ ID | PEgRNA spacer (CGG PAM) |
| | NO: 1187) | |
| 1188 | TGCCCTTCTCCAATGCGA (SEQ ID | PEgRNA spacer (CGG PAM) |
| | NO: 1188) | |
| 1189 | GTGCCCTTCTCCAATGCGA (SEQ ID | PEgRNA spacer (CGG PAM) |
| | NO: 1189) | |
| 75 | CGTGCCCTTCTCCAATGCGA (SEQ ID | PEgRNA spacer (CGG PAM) |
| | NO: 75) | |
| 1190 | ACGTGCCCTTCTCCAATGCGA (SEQ | PEgRNA spacer (CGG PAM) |
| | ID NO: 1190) | |
| 1191 | TACGTGCCCTTCTCCAATGCGA (SEQ | PEgRNA spacer (CGG PAM) |
| | ID NO: 1191) | |
| 1192 | CATTG | PBS |
| 1193 | CATTGG | PBS |
| 1194 | CATTGGA | PBS |
| 1195 | CATTGGAG | PBS |
| 1196 | CATTGGAGA | PBS |
| 1197 | CATTGGAGAA (SEQ ID NO: 1197) | PBS |
| 1198 | CATTGGAGAAG (SEQ ID NO: | PBS |
| | 1198) | |
| 1199 | CATTGGAGAAGG (SEQ ID NO: | PBS |
| | 1199) | |
| 1200 | CATTGGAGAAGGG (SEQ ID NO: | PBS |
| | 1200) | |
| 1201 | CATTGGAGAAGGGC (SEQ ID NO: | PBS |
| | 1201) | |
| 1202 | CATTGGAGAAGGGCA (SEQ ID NO: | PBS |
| | 1202) | |
| 1203 | CATTGGAGAAGGGCAC (SEQ ID NO: | PBS |
| | 1203) | |
| 1204 | CATTGGAGAAGGGCACG (SEQ ID | PBS |
| | NO: 1204) | |
| 1205 | CATTGGAGAAGGGCACGT (SEQ ID | PBS |
| | NO: 1205) | |
| 1206 | CATTGGAGAAGGGCACGTA (SEQ ID | PBS |
| | NO: 1206) | |
| 1207 | GGGCTGCGTACCACACCAGTCG (SEQ | RTT*1 (CGG-to-CTG PAM silencing |
| | ID NO: 1207) | edit) |
| 1208 | GGGCTGCGTACCACACCCGTCG (SEQ | RTT |
| | ID NO: 1208) | |
| 1209 | GGGCTGCGTACCACACCGGTCG (SEQ | RTT*2 (CGG-to-CCG PAM silencing |
| | ID NO: 1209) | edit) |
| 1210 | GGGCTGCGTACCACACCTGTCG (SEQ | RTT*3 (CGG-to-CAG PAM silencing |
| | ID NO: 1210) | edit) |
| 1211 | GGGGCTGCGTACCACACCAGTCG (SEQ | RTT*1 (CGG-to-CTG PAM silencing |
| | ID NO: 1211) | edit) |
| 1212 | GGGGCTGCGTACCACACCCGTCG (SEQ | RTT |
| | ID NO: 1212) | |
| 1213 | GGGGCTGCGTACCACACCGGTCG (SEQ | RTT*2 (CGG-to-CCG PAM silencing |
| | ID NO: 1213) | edit) |
| 1214 | GGGGCTGCGTACCACACCTGTCG (SEQ | RTT*3 (CGG-to-CAG PAM silencing |
| | ID NO: 1214) | edit) |
| 1215 | AGGGGCTGCGTACCACACCAGTCG | RTT*1 (CGG-to-CTG PAM silencing |
| | (SEQ ID NO: 1215) | edit) |
| 1216 | AGGGGCTGCGTACCACACCCGTCG | RTT |
| | (SEQ ID NO: 1216) | |
| 1217 | AGGGGCTGCGTACCACACCGGTCG | RTT*2 (CGG-to-CCG PAM silencing |
| | (SEQ ID NO: 1217) | edit) |
| 1218 | AGGGGCTGCGTACCACACCTGTCG | RTT*3 (CGG-to-CAG PAM silencing |
| | (SEQ ID NO: 1218) | edit) |
| 1219 | AAGGGGCTGCGTACCACACCAGTCG | RTT*1 (CGG-to-CTG PAM silencing |
| | (SEQ ID NO: 1219) | edit) |
| 1220 | AAGGGGCTGCGTACCACACCCGTCG | RTT |
| | (SEQ ID NO: 1220) | |
| 1221 | AAGGGGCTGCGTACCACACCGGTCG | RTT*2 (CGG-to-CCG PAM silencing |
| | (SEQ ID NO: 1221) | edit) |
| 1222 | AAGGGGCTGCGTACCACACCTGTCG | RTT*3 (CGG-to-CAG PAM silencing |
| | (SEQ ID NO: 1222) | edit) |
| 1223 | GAAGGGGCTGCGTACCACACCAGTCG | RTT*1 (CGG-to-CTG PAM silencing |
| | (SEQ ID NO: 1223) | edit) |
| 1224 | GAAGGGGCTGCGTACCACACCCGTCG | RTT |
| | (SEQ ID NO: 1224) | |
| 1225 | GAAGGGGCTGCGTACCACACCGGTCG | RTT*2 (CGG-to-CCG PAM silencing |
| | (SEQ ID NO: 1225) | edit) |
| 1226 | GAAGGGGCTGCGTACCACACCTGTCG | RTT*3 (CGG-to-CAG PAM silencing |
| | (SEQ ID NO: 1226) | edit) |
| 1227 | CGAAGGGGCTGCGTACCACACCAGTCG | RTT* 1 (CGG-to-CTG PAM silencing |
| | (SEQ ID NO: 1227) | edit) |
| 1228 | CGAAGGGGCTGCGTACCACACCCGTCG | RTT |
| | (SEQ ID NO: 1228) | |
| 1229 | CGAAGGGGCTGCGTACCACACCGGTCG | RTT*2 (CGG-to-CCG PAM silencing |
| | (SEQ ID NO: 1229) | edit) |
| 1230 | CGAAGGGGCTGCGTACCACACCTGTCG | RTT*3 (CGG-to-CAG PAM silencing |
| | (SEQ ID NO: 1230) | edit) |
| 1231 | TCGAAGGGGCTGCGTACCACACCAGTC | RTT*1 (CGG-to-CTG PAM silencing |
| | G (SEQ ID NO: 1231) | edit) |
| 1232 | TCGAAGGGGCTGCGTACCACACCCGTC | RTT |
| | G (SEQ ID NO: 1232) | |
| 1233 | TCGAAGGGGCTGCGTACCACACCGGTC | RTT*2 (CGG-to-CCG PAM silencing |
| | G (SEQ ID NO: 1233) | edit) |
| 1234 | TCGAAGGGGCTGCGTACCACACCTGTC | RTT*3 (CGG-to-CAG PAM silencing |
| | G (SEQ ID NO: 1234) | edit) |
| 1235 | CTCGAAGGGGCTGCGTACCACACCAGT | RTT*1 (CGG-to-CTG PAM silencing |
| | CG (SEQ ID NO: 1235) | edit) |
| 1236 | CTCGAAGGGGCTGCGTACCACACCCGT | RTT |
| | CG (SEQ ID NO: 1236) | |
| 1237 | CTCGAAGGGGCTGCGTACCACACCGGT | RTT*2 (CGG-to-CCG PAM silencing |
| | CG (SEQ ID NO: 1237) | edit) |
| 1238 | CTCGAAGGGGCTGCGTACCACACCTGT | RTT*3 (CGG-to-CAG PAM silencing |
| | CG (SEQ ID NO: 1238) | edit) |
| 1239 | ACTCGAAGGGGCTGCGTACCACACCAG | RTT*1 (CGG-to-CTG PAM silencing |
| | TCG (SEQ ID NO: 1239) | edit) |
| 1240 | ACTCGAAGGGGCTGCGTACCACACCCG | RTT |
| | TCG (SEQ ID NO: 1240) | |
| 1241 | ACTCGAAGGGGCTGCGTACCACACCGG | RTT*2 (CGG-to-CCG PAM silencing |
| | TCG (SEQ ID NO: 1241) | edit) |
| 1242 | ACTCGAAGGGGCTGCGTACCACACCTG | RTT*3 (CGG-to-CAG PAM silencing |
| | TCG (SEQ ID NO: 1242) | edit) |
| 1243 | TACTCGAAGGGGCTGCGTACCACACCA | RTT*1 (CGG-to-CTG PAM silencing |
| | GTCG (SEQ ID NO: 1243) | edit) |
| 1244 | TACTCGAAGGGGCTGCGTACCACACCC | RTT |
| | GTCG (SEQ ID NO: 1244) | |
| 1245 | TACTCGAAGGGGCTGCGTACCACACCG | RTT*2 (CGG-to-CCG PAM silencing |
| | GTCG (SEQ ID NO: 1245) | edit) |
| 1246 | TACTCGAAGGGGCTGCGTACCACACCT | RTT*3 (CGG-to-CAG PAM silencing |
| | GTCG (SEQ ID NO: 1246) | edit) |
| 1247 | GTACTCGAAGGGGCTGCGTACCACACC | RTT*1 (CGG-to-CTG PAM silencing |
| | AGTCG (SEQ ID NO: 1247) | edit) |
| 1248 | GTACTCGAAGGGGCTGCGTACCACACC | RTT |
| | CGTCG (SEQ ID NO: 1248) | |
| 1249 | GTACTCGAAGGGGCTGCGTACCACACC | RTT*2 (CGG-to-CCG PAM silencing |
| | GGTCG (SEQ ID NO: 1249) | edit) |
| 1250 | GTACTCGAAGGGGCTGCGTACCACACC | RTT*3 (CGG-to-CAG PAM silencing |
| | TGTCG (SEQ ID NO: 1250) | edit) |
| 1251 | GGTACTCGAAGGGGCTGCGTACCACAC | RTT*1 (CGG-to-CTG PAM silencing |
| | CAGTCG (SEQ ID NO: 1251) | edit) |
| 1252 | GGTACTCGAAGGGGCTGCGTACCACAC | RTT |
| | CCGTCG (SEQ ID NO: 1252) | |
| 1253 | GGTACTCGAAGGGGCTGCGTACCACAC | RTT*2 (CGG-to-CCG PAM silencing |
| | CGGTCG (SEQ ID NO: 1253) | edit) |
| 1254 | GGTACTCGAAGGGGCTGCGTACCACAC | RTT*3 (CGG-to-CAG PAM silencing |
| | CTGTCG (SEQ ID NO: 1254) | edit) |
| 1255 | GGGTACTCGAAGGGGCTGCGTACCACA | RTT* 1 (CGG-to-CTG PAM silencing |
| | CCAGTCG (SEQ ID NO: 1255) | edit) |
| 1256 | GGGTACTCGAAGGGGCTGCGTACCACA | RTT |
| | CCCGTCG (SEQ ID NO: 1256) | |
| 1257 | GGGTACTCGAAGGGGCTGCGTACCACA | RTT*2 (CGG-to-CCG PAM silencing |
| | CCGGTCG (SEQ ID NO: 1257) | edit) |
| 1258 | GGGTACTCGAAGGGGCTGCGTACCACA | RTT*3 (CGG-to-CAG PAM silencing |
| | CCTGTCG (SEQ ID NO: 1258) | edit) |
| 1259 | TGGGTACTCGAAGGGGCTGCGTACCAC | RTT*1 (CGG-to-CTG PAM silencing |
| | ACCAGTCG (SEQ ID NO: 1259) | edit) |
| 1260 | TGGGTACTCGAAGGGGCTGCGTACCAC | RTT |
| | ACCCGTCG (SEQ ID NO: 1260) | |
| 1261 | TGGGTACTCGAAGGGGCTGCGTACCAC | RTT*2 (CGG-to-CCG PAM silencing |
| | ACCGGTCG (SEQ ID NO: 1261) | edit) |
| 1262 | TGGGTACTCGAAGGGGCTGCGTACCAC | RTT*3 (CGG-to-CAG PAM silencing |
| | ACCTGTCG (SEQ ID NO: 1262) | edit) |
| 1263 | GTGGGTACTCGAAGGGGCTGCGTACCA | RTT*1 (CGG-to-CTG PAM silencing |
| | CACCAGTCG (SEQ ID NO: 1263) | edit) |
| 1264 | GTGGGTACTCGAAGGGGCTGCGTACCA | RTT |
| | CACCCGTCG (SEQ ID NO: 1264) | |
| 1265 | GTGGGTACTCGAAGGGGCTGCGTACCA | RTT*2 (CGG-to-CCG PAM silencing |
| | CACCGGTCG (SEQ ID NO: 1265) | edit) |
| 1266 | GTGGGTACTCGAAGGGGCTGCGTACCA | RTT*3 (CGG-to-CAG PAM silencing |
| | CACCTGTCG (SEQ ID NO: 1266) | edit |
| 1267 | TGTGGGTACTCGAAGGGGCTGCGTACC | RTT*1 (CGG-to-CTG PAM silencing |
| | ACACCAGTCG (SEQ ID NO: 1267) | edit) |
| 1268 | TGTGGGTACTCGAAGGGGCTGCGTACC | RTT |
| | ACACCCGTCG (SEQ ID NO: 1268) | |
| 1269 | TGTGGGTACTCGAAGGGGCTGCGTACC | RTT*2 (CGG-to-CCG PAM silencing |
| | ACACCGGTCG (SEQ ID NO: 1269) | edit) |
| 1270 | TGTGGGTACTCGAAGGGGCTGCGTACC | RTT*3 (CGG-to-CAG PAM silencing |
| | ACACCTGTCG (SEQ ID NO: 1270) | edit) |
| 1271 | CTGTGGGTACTCGAAGGGGCTGCGTAC | RTT*1 (CGG-to-CTG PAM silencing |
| | CACACCAGTCG (SEQ ID NO: | edit) |
| | 1271) | |
| 1272 | CTGTGGGTACTCGAAGGGGCTGCGTAC | RTT |
| | CACACCCGTCG (SEQ ID NO: | |
| | 1272) | |
| 1273 | CTGTGGGTACTCGAAGGGGCTGCGTAC | RTT*2 (CGG-to-CCG PAM silencing |
| | CACACCGGTCG (SEQ ID NO: | edit) |
| | 1273) | |
| 1274 | CTGTGGGTACTCGAAGGGGCTGCGTAC | RTT*3 (CGG-to-CAG PAM silencing |
| | CACACCTGTCG (SEQ ID NO: | edit) |
| | 1274) | |
| 1275 | ACTGTGGGTACTCGAAGGGGCTGCGTA | RTT*1 (CGG-to-CTG PAM silencing |
| | CCACACCAGTCG (SEQ ID NO: | edit) |
| | 1275) | |
| 1276 | ACTGTGGGTACTCGAAGGGGCTGCGTA | RTT |
| | CCACACCCGTCG (SEQ ID NO: | |
| | 1276) | |
| 1277 | ACTGTGGGTACTCGAAGGGGCTGCGTA | RTT*2 (CGG-to-CCG PAM silencing |
| | CCACACCGGTCG (SEQ ID NO: | edit) |
| | 1277) | |
| 1278 | ACTGTGGGTACTCGAAGGGGCTGCGTA | RTT*3 (CGG-to-CAG PAM silencing |
| | CCACACCTGTCG (SEQ ID NO: | edit) |
| | 1278) | |
| 1279 | TACTGTGGGTACTCGAAGGGGCTGCGT | RTT*1 (CGG-to-CTG PAM silencing |
| | ACCACACCAGTCG (SEQ ID NO: | edit) |
| | 1279) | |
| 1280 | TACTGTGGGTACTCGAAGGGGCTGCGT | RTT |
| | ACCACACCCGTCG (SEQ ID NO: | |
| | 1280) | |
| 1281 | TACTGTGGGTACTCGAAGGGGCTGCGT | RTT*2 (CGG-to-CCG PAM silencing |
| | ACCACACCGGTCG (SEQ ID NO: | edit) |
| | 1281) | |
| 1282 | TACTGTGGGTACTCGAAGGGGCTGCGT | RTT*3 (CGG-to-CAG PAM silencing |
| | ACCACACCTGTCG (SEQ ID NO:) | edit) |
| | 1282 | |
| 849 | AAACATGTAGGCGGCCAGCA (SEQ ID | PE3 ngRNA spacer (TGG PAM) |
| | NO: 849) | |
| 850 | AGAACTGCCATGGCTCAGCC (SEQ ID | PE3 ngRNA spacer (AGG PAM) |
| | NO: 850) | |
| 851 | AGAGCGTGAGGAAGTTGATG (SEQ ID | PE3 ngRNA spacer (GGG PAM) |
| | NO: 851) | |
| 520 | AGTACTGTGGGTACTCGAAG (SEQ ID | PE3 ngRNA spacer (TGG PAM) |
| | NO: 520) | |
| 852 | CACGATCAGCAGAAACATGT (SEQ ID | PE3 ngRNA spacer (AGG PAM) |
| | NO: 852) | |
| 853 | GATCAGCAGAAACATGTAGG (SEQ ID | PE3 ngRNA spacer (CGG PAM) |
| | NO: 853) | |
| 854 | GCCAGCATGGAGAACTGCCA (SEQ ID | PE3 ngRNA spacer (TGG PAM) |
| | NO: 854) | |
| 1283 | GCGTACCACACCAGTCGCAT (SEQ ID | PE3b* 1 ngRNA spacer (TGG PAM) |
| | NO: 1283) | |
| 862 | GCGTACCACACCCGTCGCAT (SEQ ID | PE3 ngRNA spacer (TGG PAM) |
| | NO: 862) | |
| 1284 | GCGTACCACACCGGTCGCAT (SEQ ID | PE3b*2 ngRNA spacer (TGG PAM) |
| | NO: 1284) | |
| 1285 | GCGTACCACACCTGTCGCAT (SEQ ID | PE3b*3 ngRNA spacer (TGG PAM) |
| | NO: 1285) | |
| 4 | GCTCAGCCAGGTAGTACTGT (SEQ ID | PE3 ngRNA spacer (GGG PAM) |
| | NO: 4) | |
| 855 | GGCTCAGCCAGGTAGTACTG (SEQ ID | PE3 ngRNA spacer (TGG PAM) |
| | NO: 855) | |
| 856 | GTAGAGCGTGAGGAAGTTGA (SEQ ID | PE3 ngRNA spacer (TGG PAM) |
| | NO: 856) | |
| 857 | TAGAGCGTGAGGAAGTTGAT (SEQ ID | PE3 ngRNA spacer (GGG PAM) |
| | NO: 857) | |
| 858 | GGACGGTGACGTAGAGCGTG (SEQ ID | PE3 ngRNA spacer (AGG PAM) |
| | NO: 858) | |
| 1286 | CGTGCCCTTCTCCAATGCGAGTTTTAGA | pegRNA; contains gRNA core SEQ ID |
| | GCTAGAAATAGCAAGTTAAAATAAGGCT | NO: 1854 |
| | AGTCCGTTATCAACTTGAAAAAGTGGCA | |
| | CCGAGTCGGTGCGAAGGGGCTGCGTACC | |
| | ACACCCGTCGCATTGGAG (SEQ ID | |
| | NO: 1286) | |
| 1287 | CGTGCCCTTCTCCAATGCGAGTTTTAGA | pegRNA; contains gRNA core SEQ ID |
| | GCTAGAAATAGCAAGTTAAAATAAGGCT | NO: 1854 |
| | AGTCCGTTATCAACTTGAAAAAGTGGCA | |
| | CCGAGTCGGTGCGAAGGGGCTGCGTACC | |
| | ACACCCGTCGCATTGGAGAA (SEQ ID | |
| | NO: 1287) | |
| 1288 | CGTGCCCTTCTCCAATGCGAGTTTTAGA | pegRNA; contains gRNA core SEQ ID |
| | GCTAGAAATAGCAAGTTAAAATAAGGCT | NO: 1854 |
| | AGTCCGTTATCAACTTGAAAAAGTGGCA | |
| | CCGAGTCGGTGCTCGAAGGGGCTGCGTA | |
| | CCACACCCGTCGCATTGGAG (SEQ ID | |
| | NO: 1288) | |
| 1289 | CGTGCCCTTCTCCAATGCGAGTTTTAGA | pegRNA; contains gRNA core SEQ ID |
| | GCTAGAAATAGCAAGTTAAAATAAGGCT | NO: 1854, and TTTT (sequence number |
| | AGTCCGTTATCAACTTGAAAAAGTGGCA | 1860) 3′ terminal sequence |
| | CCGAGTCGGTGCGAAGGGGCTGCGTACC | |
| | ACACCCGTCGCATTGGAGTTTT (SEQ | |
| | ID NO: 1289) | |
| 1290 | CGTGCCCTTCTCCAATGCGAGTTTTAGA | pegRNA; contains gRNA core SEQ ID |
| | GCTAGAAATAGCAAGTTAAAATAAGGCT | NO: 1854 |
| | AGTCCGTTATCAACTTGAAAAAGTGGCA | |
| | CCGAGTCGGTGCGAAGGGGCTGCGTACC | |
| | ACACCCGTCGCATTGGAGAAGG (SEQ | |
| | ID NO: 1290) | |
| 1291 | CGTGCCCTTCTCCAATGCGAGTTTTAGA | pegRNA; contains gRNA core SEQ ID |
| | GCTAGAAATAGCAAGTTAAAATAAGGCT | NO: 1854 |
| | AGTCCGTTATCAACTTGAAAAAGTGGCA | |
| | CCGAGTCGGTGCTCGAAGGGGCTGCGTA | |
| | CCACACCCGTCGCATTGGAGAA (SEQ | |
| | ID NO: 1291) | |
| 1292 | CGTGCCCTTCTCCAATGCGAGTTTTAGA | pegRNA; contains gRNA core SEQ ID |
| | GCTAGAAATAGCAAGTTAAAATAAGGCT | NO: 1854 |
| | AGTCCGTTATCAACTTGAAAAAGTGGCA | |
| | CCGAGTCGGTGCACTCGAAGGGGCTGCG | |
| | TACCACACCCGTCGCATTGGAG (SEQ | |
| | ID NO: 1292) | |
| 1293 | CGTGCCCTTCTCCAATGCGAGTTTTAGA | pegRNA; contains gRNA core SEQ ID |
| | GCTAGAAATAGCAAGTTAAAATAAGGCT | NO: 1854, and TTTT (sequence number |
| | AGTCCGTTATCAACTTGAAAAAGTGGCA | 1860) 3′ terminal sequence |
| | CCGAGTCGGTGCTCGAAGGGGCTGCGTA | |
| | CCACACCCGTCGCATTGGAGTTTT | |
| | (SEQ ID NO: 1293) | |
| 1294 | CGTGCCCTTCTCCAATGCGAGTTTTAGA | pegRNA; contains gRNA core SEQ ID |
| | GCTAGAAATAGCAAGTTAAAATAAGGCT | NO: 1854, and TTTT (sequence number |
| | AGTCCGTTATCAACTTGAAAAAGTGGCA | 1860) 3′ terminal sequence |
| | CCGAGTCGGTGCGAAGGGGCTGCGTACC | |
| | ACACCCGTCGCATTGGAGAATTTT | |
| | (SEQ ID NO: 1294) | |
| 1295 | CGTGCCCTTCTCCAATGCGAGTTTTAGA | pegRNA; contains gRNA core SEQ ID |
| | GCTAGAAATAGCAAGTTAAAATAAGGCT | NO: 1854 |
| | AGTCCGTTATCAACTTGAAAAAGTGGCA | |
| | CCGAGTCGGTGCGAAGGGGCTGCGTACC | |
| | ACACCCGTCGCATTGGAGAAGGGC | |
| | (SEQ ID NO: 1295) | |
| 1296 | CGTGCCCTTCTCCAATGCGAGTTTTAGA | pegRNA; contains gRNA core SEQ ID |
| | GCTAGAAATAGCAAGTTAAAATAAGGCT | NO: 1854 |
| | AGTCCGTTATCAACTTGAAAAAGTGGCA | |
| | CCGAGTCGGTGCTCGAAGGGGCTGCGTA | |
| | CCACACCCGTCGCATTGGAGAAGG | |
| | (SEQ ID NO: 1296) | |
| 1297 | CGTGCCCTTCTCCAATGCGAGTTTTAGA | pegRNA; contains gRNA core SEQ ID |
| | GCTAGAAATAGCAAGTTAAAATAAGGCT | NO: 1854 |
| | AGTCCGTTATCAACTTGAAAAAGTGGCA | |
| | CCGAGTCGGTGCACTCGAAGGGGCTGCG | |
| | TACCACACCCGTCGCATTGGAGAA | |
| | (SEQ ID NO: 1297) | |
| 1298 | CGTGCCCTTCTCCAATGCGAGTTTTAGA | pegRNA; contains gRNA core SEQ ID |
| | GCTAGAAATAGCAAGTTAAAATAAGGCT | NO: 1854 |
| | AGTCCGTTATCAACTTGAAAAAGTGGCA | |
| | CCGAGTCGGTGCGTACTCGAAGGGGCTG | |
| | CGTACCACACCCGTCGCATTGGAG | |
| | (SEQ ID NO: 1298) | |
| 1299 | CGTGCCCTTCTCCAATGCGAGTTTTAGA | pegRNA; contains gRNA core SEQ ID |
| | GCTAGAAATAGCAAGTTAAAATAAGGCT | NO: 1854, and TTTT (sequence number |
| | AGTCCGTTATCAACTTGAAAAAGTGGCA | 1860) 3′ terminal sequence |
| | CCGAGTCGGTGCACTCGAAGGGGCTGCG | |
| | TACCACACCCGTCGCATTGGAGTTTT | |
| | (SEQ ID NO: 1299) | |
| 1300 | CGTGCCCTTCTCCAATGCGAGTTTTAGA | pegRNA; contains gRNA core SEQ ID |
| | GCTAGAAATAGCAAGTTAAAATAAGGCT | NO: 1854, and TTTT (sequence number |
| | AGTCCGTTATCAACTTGAAAAAGTGGCA | 1860) 3′ terminal sequence |
| | CCGAGTCGGTGCTCGAAGGGGCTGCGTA | |
| | CCACACCCGTCGCATTGGAGAATTTT | |
| | (SEQ ID NO: 1300) | |
| 1301 | CGTGCCCTTCTCCAATGCGAGTTTTAGA | pegRNA; contains gRNA core SEQ ID |
| | GCTAGAAATAGCAAGTTAAAATAAGGCT | NO: 1854, and TTTT (sequence number |
| | AGTCCGTTATCAACTTGAAAAAGTGGCA | 1860) 3′ terminal sequence |
| | CCGAGTCGGTGCGAAGGGGCTGCGTACC | |
| | ACACCCGTCGCATTGGAGAAGGTTTT | |
| | (SEQ ID NO: 1301) | |
| 1302 | CGTGCCCTTCTCCAATGCGAGTTTTAGA | pegRNA; contains gRNA core SEQ ID |
| | GCTAGAAATAGCAAGTTAAAATAAGGCT | NO: 1854 |
| | AGTCCGTTATCAACTTGAAAAAGTGGCA | |
| | CCGAGTCGGTGCTCGAAGGGGCTGCGTA | |
| | CCACACCCGTCGCATTGGAGAAGGGC | |
| | (SEQ ID NO: 1302) | |
| 1303 | CGTGCCCTTCTCCAATGCGAGTTTTAGA | pegRNA; contains gRNA core SEQ ID |
| | GCTAGAAATAGCAAGTTAAAATAAGGCT | NO: 1854 |
| | AGTCCGTTATCAACTTGAAAAAGTGGCA | |
| | CCGAGTCGGTGCACTCGAAGGGGCTGCG | |
| | TACCACACCCGTCGCATTGGAGAAGG | |
| | (SEQ ID NO: 1303) | |
| 1304 | CGTGCCCTTCTCCAATGCGAGTTTTAGA | pegRNA; contains gRNA core SEQ ID |
| | GCTAGAAATAGCAAGTTAAAATAAGGCT | NO: 1854 |
| | AGTCCGTTATCAACTTGAAAAAGTGGCA | |
| | CCGAGTCGGTGCGTACTCGAAGGGGCTG | |
| | CGTACCACACCCGTCGCATTGGAGAA | |
| | (SEQ ID NO: 1304) | |
| 1305 | CGTGCCCTTCTCCAATGCGAGTTTTAGA | pegRNA; contains gRNA core SEQ ID |
| | GCTAGAAATAGCAAGTTAAAATAAGGCT | NO: 1854, and TTTT (sequence number |
| | AGTCCGTTATCAACTTGAAAAAGTGGCA | 1860) 3′ terminal sequence |
| | CCGAGTCGGTGCGTACTCGAAGGGGCTG | |
| | CGTACCACACCCGTCGCATTGGAGTTTT | |
| | (SEQ ID NO: 1305) | |
| 1306 | CGTGCCCTTCTCCAATGCGAGTTTTAGA | pegRNA; contains gRNA core SEQ ID |
| | GCTAGAAATAGCAAGTTAAAATAAGGCT | NO: 1854, and TTTT (sequence number |
| | AGTCCGTTATCAACTTGAAAAAGTGGCA | 1860) 3′ terminal sequence |
| | CCGAGTCGGTGCACTCGAAGGGGCTGCG | |
| | TACCACACCCGTCGCATTGGAGAATTTT | |
| | (SEQ ID NO: 1306) | |
| 1307 | CGTGCCCTTCTCCAATGCGAGTTTTAGA | pegRNA; contains gRNA core SEQ ID |
| | GCTAGAAATAGCAAGTTAAAATAAGGCT | NO: 1854, and TTTT (sequence number |
| | AGTCCGTTATCAACTTGAAAAAGTGGCA | 1860) 3′ terminal sequence |
| | CCGAGTCGGTGCTCGAAGGGGCTGCGTA | |
| | CCACACCCGTCGCATTGGAGAAGGTTTT | |
| | (SEQ ID NO: 1307) | |
| 1308 | CGTGCCCTTCTCCAATGCGAGTTTTAGA | pegRNA; contains gRNA core SEQ ID |
| | GCTAGAAATAGCAAGTTAAAATAAGGCT | NO: 1854, and TTTT (sequence number |
| | AGTCCGTTATCAACTTGAAAAAGTGGCA | 1860) 3′ terminal sequence |
| | CCGAGTCGGTGCGAAGGGGCTGCGTACC | |
| | ACACCCGTCGCATTGGAGAAGGGCTTTT | |
| | (SEQ ID NO: 1308) | |
| 1309 | CGTGCCCTTCTCCAATGCGAGTTTTAGA | pegRNA; contains gRNA core SEQ ID |
| | GCTAGAAATAGCAAGTTAAAATAAGGCT | NO: 1854 |
| | AGTCCGTTATCAACTTGAAAAAGTGGCA | |
| | CCGAGTCGGTGCACTCGAAGGGGCTGCG | |
| | TACCACACCCGTCGCATTGGAGAAGGGC | |
| | (SEQ ID NO: 1309) | |
| 1310 | CGTGCCCTTCTCCAATGCGAGTTTTAGA | pegRNA; contains gRNA core SEQ ID |
| | GCTAGAAATAGCAAGTTAAAATAAGGCT | NO: 1854 |
| | AGTCCGTTATCAACTTGAAAAAGTGGCA | |
| | CCGAGTCGGTGCGTACTCGAAGGGGCTG | |
| | CGTACCACACCCGTCGCATTGGAGAAGG | |
| | (SEQ ID NO: 1310) | |
| 1311 | CGTGCCCTTCTCCAATGCGAGTTTTAGA | pegRNA; contains gRNA core SEQ ID |
| | GCTAGAAATAGCAAGTTAAAATAAGGCT | NO: 1854, and TTTT (sequence number |
| | AGTCCGTTATCAACTTGAAAAAGTGGCA | 1860) 3′ terminal sequence |
| | CCGAGTCGGTGCGTACTCGAAGGGGCTG | |
| | CGTACCACACCCGTCGCATTGGAGAATT | |
| | TT (SEQ ID NO: 1311) | |
| 1312 | CGTGCCCTTCTCCAATGCGAGTTTTAGA | pegRNA; contains gRNA core SEQ ID |
| | GCTAGAAATAGCAAGTTAAAATAAGGCT | NO: 1854, and TTTT (sequence number |
| | AGTCCGTTATCAACTTGAAAAAGTGGCA | 1860) 3′ terminal sequence |
| | CCGAGTCGGTGCACTCGAAGGGGCTGCG | |
| | TACCACACCCGTCGCATTGGAGAAGGTT | |
| | TT (SEQ ID NO: 1312) | |
| 1313 | CGTGCCCTTCTCCAATGCGAGTTTTAGA | pegRNA; contains gRNA core SEQ ID |
| | GCTAGAAATAGCAAGTTAAAATAAGGCT | NO: 1854, and TTTT (sequence number |
| | AGTCCGTTATCAACTTGAAAAAGTGGCA | 1860) 3′ terminal sequence |
| | CCGAGTCGGTGCTCGAAGGGGCTGCGTA | |
| | CCACACCCGTCGCATTGGAGAAGGGCTT | |
| | TT (SEQ ID NO: 1313) | |
| 1314 | CGTGCCCTTCTCCAATGCGAGTTTTAGA | pegRNA; contains gRNA core SEQ ID |
| | GCTAGAAATAGCAAGTTAAAATAAGGCT | NO: 1854 |
| | AGTCCGTTATCAACTTGAAAAAGTGGCA | |
| | CCGAGTCGGTGCGTACTCGAAGGGGCTG | |
| | CGTACCACACCCGTCGCATTGGAGAAGG | |
| | GC (SEQ ID NO: 1314) | |
| 1315 | CGTGCCCTTCTCCAATGCGAGTTTTAGA | pegRNA; contains gRNA core SEQ ID |
| | GCTAGAAATAGCAAGTTAAAATAAGGCT | NO: 1854, and TTTT (sequence number |
| | AGTCCGTTATCAACTTGAAAAAGTGGCA | 1860) 3′ terminal sequence |
| | CCGAGTCGGTGCGTACTCGAAGGGGCTG | |
| | CGTACCACACCCGTCGCATTGGAGAAGG | |
| | TTTT (SEQ ID NO: 1315) | |
| 1316 | CGTGCCCTTCTCCAATGCGAGTTTTAGA | pegRNA; contains gRNA core SEQ ID |
| | GCTAGAAATAGCAAGTTAAAATAAGGCT | NO: 1854, and TTTT (sequence number |
| | AGTCCGTTATCAACTTGAAAAAGTGGCA | 1860) 3′ terminal sequence |
| | CCGAGTCGGTGCACTCGAAGGGGCTGCG | |
| | TACCACACCCGTCGCATTGGAGAAGGGC | |
| | TTTT (SEQ ID NO: 1316) | |
| 1317 | CGTGCCCTTCTCCAATGCGAGTTTTAGA | pegRNA; contains gRNA core SEQ ID |
| | GCTAGAAATAGCAAGTTAAAATAAGGCT | NO: 1854, and TTTT (sequence number |
| | AGTCCGTTATCAACTTGAAAAAGTGGCA | 1860) 3′ terminal sequence |
| | CCGAGTCGGTGCGTACTCGAAGGGGCTG | |
| | CGTACCACACCCGTCGCATTGGAGAAGG | |
| | GCTTTT (SEQ ID NO: 1317) | |
| 1318 | CGTGCCCTTCTCCAATGCGAGTTTTAGA | pegRNA; contains gRNA core SEQ ID |
| | GCTAGAAATAGCAAGTTAAAATAAGGCT | NO: 1854, and Linker [AACATTGA |
| | AGTCCGTTATCAACTTGAAAAAGTGGCA | (Sequence Number: 1728)] + Univ. 3′ |
| | CCGAGTCGGTGCGAAGGGGCTGCGTACC | Motif |
| | ACACCCGTCGCATTGGAGAACATTGACG | [CGCGTCTCTACGTGGGGGCGCG |
| | CGTCTCTACGTGGGGGCGCG (SEQ ID | (Sequence Number: 1850)] |
| | NO: 1318) | |
| 1319 | CGTGCCCTTCTCCAATGCGAGTTTTAGA | pegRNA; contains gRNA core SEQ ID |
| | GCTAGAAATAGCAAGTTAAAATAAGGCT | NO: 1854, and Linker [AACATTGA |
| | AGTCCGTTATCAACTTGAAAAAGTGGCA | (Sequence Number: 1728)] + Univ. 3′ |
| | CCGAGTCGGTGCGAAGGGGCTGCGTACC | Motif |
| | ACACCCGTCGCATTGGAGAAAACATTGA | [CGCGTCTCTACGTGGGGGCGCG |
| | CGCGTCTCTACGTGGGGGCGCG (SEQ | (Sequence Number: 1850)] |
| | ID NO: 1319) | |
| 1320 | CGTGCCCTTCTCCAATGCGAGTTTTAGA | pegRNA; contains gRNA core SEQ ID |
| | GCTAGAAATAGCAAGTTAAAATAAGGCT | NO: 1854, and Linker [AACATTGA |
| | AGTCCGTTATCAACTTGAAAAAGTGGCA | (Sequence Number: 1728)] + Univ. 3′ |
| | CCGAGTCGGTGCTCGAAGGGGCTGCGTA | Motif |
| | CCACACCCGTCGCATTGGAGAACATTGA | [CGCGTCTCTACGTGGGGGCGCG |
| | CGCGTCTCTACGTGGGGGCGCG (SEQ | (Sequence Number: 1850)] |
| | ID NO: 1320) | |
| 1321 | CGTGCCCTTCTCCAATGCGAGTTTTAGA | pegRNA; contains gRNA core SEQ ID |
| | GCTAGAAATAGCAAGTTAAAATAAGGCT | NO: 1854, and Linker [AACATTGA |
| | AGTCCGTTATCAACTTGAAAAAGTGGCA | (Sequence Number: 1728)] + Univ. 3′ |
| | CCGAGTCGGTGCGAAGGGGCTGCGTACC | Motif |
| | ACACCCGTCGCATTGGAGAAGGAACATT | [CGCGTCTCTACGTGGGGGCGCG |
| | GACGCGTCTCTACGTGGGGGCGCG | (Sequence Number: 1850)] |
| | (SEQ ID NO: 1321) | |
| 1322 | CGTGCCCTTCTCCAATGCGAGTTTTAGA | pegRNA; contains gRNA core SEQ ID |
| | GCTAGAAATAGCAAGTTAAAATAAGGCT | NO: 1854, and Linker [AACATTGA |
| | AGTCCGTTATCAACTTGAAAAAGTGGCA | (Sequence Number: 1728)] + Univ. 3′ |
| | CCGAGTCGGTGCTCGAAGGGGCTGCGTA | Motif |
| | CCACACCCGTCGCATTGGAGAAAACATT | [CGCGTCTCTACGTGGGGGCGCG |
| | GACGCGTCTCTACGTGGGGGCGCG | (Sequence Number: 1850)] |
| | (SEQ ID NO: 1322) | |
| 1323 | CGTGCCCTTCTCCAATGCGAGTTTTAGA | pegRNA; contains gRNA core SEQ ID |
| | GCTAGAAATAGCAAGTTAAAATAAGGCT | NO: 1854, and Linker [AACATTGA |
| | AGTCCGTTATCAACTTGAAAAAGTGGCA | (Sequence Number: 1728)] + Univ. 3′ |
| | CCGAGTCGGTGCACTCGAAGGGGCTGCG | Motif |
| | TACCACACCCGTCGCATTGGAGAACATT | [CGCGTCTCTACGTGGGGGCGCG |
| | GACGCGTCTCTACGTGGGGGCGCG | (Sequence Number: 1850)] |
| | (SEQ ID NO: 1323) | |
| 1324 | CGTGCCCTTCTCCAATGCGAGTTTTAGA | pegRNA; contains gRNA core SEQ ID |
| | GCTAGAAATAGCAAGTTAAAATAAGGCT | NO: 1854, and Linker [AACATTGA |
| | AGTCCGTTATCAACTTGAAAAAGTGGCA | (Sequence Number: 1728)] + Univ. 3′ |
| | CCGAGTCGGTGCGAAGGGGCTGCGTACC | Motif |
| | ACACCCGTCGCATTGGAGAAGGGCAACA | [CGCGTCTCTACGTGGGGGCGCG |
| | TTGACGCGTCTCTACGTGGGGGCGCG | (Sequence Number: 1850)] |
| | (SEQ ID NO: 1324) | |
| 1325 | CGTGCCCTTCTCCAATGCGAGTTTTAGA | pegRNA; contains gRNA core SEQ ID |
| | GCTAGAAATAGCAAGTTAAAATAAGGCT | NO: 1854, and Linker [AACATTGA |
| | AGTCCGTTATCAACTTGAAAAAGTGGCA | (Sequence Number: 1728)] + Univ. 3′ |
| | CCGAGTCGGTGCTCGAAGGGGCTGCGTA | Motif |
| | CCACACCCGTCGCATTGGAGAAGGAACA | [CGCGTCTCTACGTGGGGGCGCG |
| | TTGACGCGTCTCTACGTGGGGGCGCG | (Sequence Number: 1850)] |
| | (SEQ ID NO: 1325) | |
| 1326 | CGTGCCCTTCTCCAATGCGAGTTTTAGA | pegRNA; contains gRNA core SEQ ID |
| | GCTAGAAATAGCAAGTTAAAATAAGGCT | NO: 1854, and Linker [AACATTGA |
| | AGTCCGTTATCAACTTGAAAAAGTGGCA | (Sequence Number: 1728)] + Univ. 3′ |
| | CCGAGTCGGTGCACTCGAAGGGGCTGCG | Motif |
| | TACCACACCCGTCGCATTGGAGAAAACA | [CGCGTCTCTACGTGGGGGCGCG |
| | TTGACGCGTCTCTACGTGGGGGCGCG | (Sequence Number: 1850)] |
| | (SEQ ID NO: 1326) | |
| 1327 | CGTGCCCTTCTCCAATGCGAGTTTTAGA | pegRNA; contains gRNA core SEQ ID |
| | GCTAGAAATAGCAAGTTAAAATAAGGCT | NO: 1854, and Linker [AACATTGA |
| | AGTCCGTTATCAACTTGAAAAAGTGGCA | (Sequence Number: 1728)] + Univ. 3′ |
| | CCGAGTCGGTGCTCGAAGGGGCTGCGTA | Motif |
| | CCACACCCGTCGCATTGGAGAAGGGCAA | [CGCGTCTCTACGTGGGGGCGCG |
| | CATTGACGCGTCTCTACGTGGGGGCGCG | (Sequence Number: 1850)] |
| | (SEQ ID NO: 1327) | |
| 1328 | CGTGCCCTTCTCCAATGCGAGTTTTAGA | pegRNA; contains gRNA core SEQ ID |
| | GCTAGAAATAGCAAGTTAAAATAAGGCT | NO: 1854, and Linker [AACATTGA |
| | AGTCCGTTATCAACTTGAAAAAGTGGCA | (Sequence Number: 1728)] + Univ. 3′ |
| | CCGAGTCGGTGCACTCGAAGGGGCTGCG | Motif |
| | TACCACACCCGTCGCATTGGAGAAGGAA | [CGCGTCTCTACGTGGGGGCGCG |
| | CATTGACGCGTCTCTACGTGGGGGCGCG | (Sequence Number: 1850)] |
| | (SEQ ID NO: 1328) | |
| 1329 | CGTGCCCTTCTCCAATGCGAGTTTTAGA | pegRNA; contains gRNA core SEQ ID |
| | GCTAGAAATAGCAAGTTAAAATAAGGCT | NO: 1854, and Linker [AACATTGA |
| | AGTCCGTTATCAACTTGAAAAAGTGGCA | (Sequence Number: 1728)] + Univ. 3′ |
| | CCGAGTCGGTGCACTCGAAGGGGCTGCG | Motif |
| | TACCACACCCGTCGCATTGGAGAAGGGC | [CGCGTCTCTACGTGGGGGCGCG |
| | AACATTGACGCGTCTCTACGTGGGGGCG | (Sequence Number: 1850)] |
| | CG (SEQ ID NO: 1329) | |
| 1157 | GCGTACCACACCCGTCGCATGTTTTAGA | PE3 ngRNA (TGG PAM); contains |
| | GCTAGAAATAGCAAGTTAAAATAAGGCT | gRNA core SEQ ID NO: 1854 |
| | AGTCCGTTATCAACTTGAAAAAGTGGCA | |
| | CCGAGTCGGTGC (SEQ ID NO: | |
| | 1157) | |
| 1161 | AGTACTGTGGGTACTCGAAGGTTTTAGA | PE3 ngRNA (TGG PAM); contains |
| | GCTAGAAATAGCAAGTTAAAATAAGGCT | gRNA core SEQ ID NO: 1854 |
| | AGTCCGTTATCAACTTGAAAAAGTGGCA | |
| | CCGAGTCGGTGC (SEQ ID NO: | |
| | 1161) | |
| 1162 | GCTCAGCCAGGTAGTACTGTGTTTTAGA | PE3 ngRNA (GGG PAM); contains |
| | GCTAGAAATAGCAAGTTAAAATAAGGCT | gRNA core SEQ ID NO: 1854 |
| | AGTCCGTTATCAACTTGAAAAAGTGGCA | |
| | CCGAGTCGGTGC (SEQ ID NO: | |
| | 1162) | |
| 1163 | GGCTCAGCCAGGTAGTACTGGTTTTAGA | PE3 ngRNA (TGG PAM); contains |
| | GCTAGAAATAGCAAGTTAAAATAAGGCT | gRNA core SEQ ID NO: 1854 |
| | AGTCCGTTATCAACTTGAAAAAGTGGCA | |
| | CCGAGTCGGTGC (SEQ ID NO: | |
| | 1163) | |
| 1164 | AGAACTGCCATGGCTCAGCCGTTTTAGA | PE3 ngRNA (AGG PAM); contains |
| | GCTAGAAATAGCAAGTTAAAATAAGGCT | gRNA core SEQ ID NO: 1854 |
| | AGTCCGTTATCAACTTGAAAAAGTGGCA | |
| | CCGAGTCGGTGC (SEQ ID NO: | |
| | 1164) | |
| 1165 | GCCAGCATGGAGAACTGCCAGTTTTAGA | PE3 ngRNA (TGG PAM); contains |
| | GCTAGAAATAGCAAGTTAAAATAAGGCT | gRNA core SEQ ID NO: 1854 |
| | AGTCCGTTATCAACTTGAAAAAGTGGCA | |
| | CCGAGTCGGTGC (SEQ ID NO: | |
| | 1165) | |
| 1166 | AAACATGTAGGCGGCCAGCAGTTTTAGA | PE3 ngRNA (TGG PAM); contains |
| | GCTAGAAATAGCAAGTTAAAATAAGGCT | gRNA core SEQ ID NO: 1854 |
| | AGTCCGTTATCAACTTGAAAAAGTGGCA | |
| | CCGAGTCGGTGC (SEQ ID NO: | |
| | 1166) | |
| 1167 | GATCAGCAGAAACATGTAGGGTTTTAGA | PE3 ngRNA (CGG PAM); contains |
| | GCTAGAAATAGCAAGTTAAAATAAGGCT | gRNA core SEQ ID NO: 1854 |
| | AGTCCGTTATCAACTTGAAAAAGTGGCA | |
| | CCGAGTCGGTGC (SEQ ID NO: | |
| | 1167) | |
| 1168 | CACGATCAGCAGAAACATGTGTTTTAGA | PE3 ngRNA (AGG PAM); contains |
| | GCTAGAAATAGCAAGTTAAAATAAGGCT | gRNA core SEQ ID NO: 1854 |
| | AGTCCGTTATCAACTTGAAAAAGTGGCA | |
| | CCGAGTCGGTGC (SEQ ID NO: | |
| | 1168) | |
| 1169 | AGAGCGTGAGGAAGTTGATGGTTTTAGA | PE3 ngRNA (GGG PAM); contains |
| | GCTAGAAATAGCAAGTTAAAATAAGGCT | gRNA core SEQ ID NO: 1854 |
| | AGTCCGTTATCAACTTGAAAAAGTGGCA | |
| | CCGAGTCGGTGC (SEQ ID NO: | |
| | 1169) | |
| 1170 | GAGAACTGCCATGGCTCAGCCGTTTTAG | PE3 ngRNA (AGG PAM); contains |
| | AGCTAGAAATAGCAAGTTAAAATAAGGC | gRNA core SEQ ID NO: 1854 |
| | TAGTCCGTTATCAACTTGAAAAAGTGGC | |
| | ACCGAGTCGGTGC (SEQ ID NO: | |
| | 1170) | |
| 1171 | GCGTACCACACCCGTCGCATGTTTTAGA | PE3 ngRNA (TGG PAM); contains |
| | GCTAGAAATAGCAAGTTAAAATAAGGCT | gRNA core SEQ ID NO: 1854, and |
| | AGTCCGTTATCAACTTGAAAAAGTGGCA | Linker [AACATTGA (Sequence |
| | CCGAGTCGGTGCAACATTGACGCGTCTC | Number: 1728)] + Univ. 3′ Motif |
| | TACGTGGGGGCGCG (SEQ ID NO: | [CGCGTCTCTACGTGGGGGCGCG |
| | 1171) | (Sequence Number: 1850)] |
| 1175 | AGTACTGTGGGTACTCGAAGGTTTTAGA | PE3 ngRNA (TGG PAM); contains |
| | GCTAGAAATAGCAAGTTAAAATAAGGCT | gRNA core SEQ ID NO: 1854, and |
| | AGTCCGTTATCAACTTGAAAAAGTGGCA | Linker [AACATTGA (Sequence |
| | CCGAGTCGGTGCAACATTGACGCGTCTC | Number: 1728)] + Univ. 3′ Motif |
| | TACGTGGGGGCGCG (SEQ ID NO: | [CGCGTCTCTACGTGGGGGCGCG |
| | 1175) | (Sequence Number: 1850)] |
| 1176 | GCTCAGCCAGGTAGTACTGTGTTTTAGA | PE3 ngRNA (GGG PAM); contains |
| | GCTAGAAATAGCAAGTTAAAATAAGGCT | gRNA core SEQ ID NO: 1854, and |
| | AGTCCGTTATCAACTTGAAAAAGTGGCA | Linker [AACATTGA (Sequence |
| | CCGAGTCGGTGCAACATTGACGCGTCTC | Number: 1728)] + Univ. 3′ Motif |
| | TACGTGGGGGCGCG (SEQ ID NO: | [CGCGTCTCTACGTGGGGGCGCG |
| | 1176) | (Sequence Number: 1850)] |
| 1177 | GGCTCAGCCAGGTAGTACTGGTTTTAGA | PE3 ngRNA (TGG PAM); contains |
| | GCTAGAAATAGCAAGTTAAAATAAGGCT | gRNA core SEQ ID NO: 1854, and |
| | AGTCCGTTATCAACTTGAAAAAGTGGCA | Linker [AACATTGA (Sequence |
| | CCGAGTCGGTGCAACATTGACGCGTCTC | Number: 1728)] + Univ. 3′ Motif |
| | TACGTGGGGGCGCG (SEQ ID NO: | [CGCGTCTCTACGTGGGGGCGCG |
| | 1177) | (Sequence Number: 1850)] |
| 1178 | AGAACTGCCATGGCTCAGCCGTTTTAGA | PE3 ngRNA (AGG PAM); contains |
| | GCTAGAAATAGCAAGTTAAAATAAGGCT | gRNA core SEQ ID NO: 1854, and |
| | AGTCCGTTATCAACTTGAAAAAGTGGCA | Linker [AACATTGA (Sequence |
| | CCGAGTCGGTGCAACATTGACGCGTCTC | Number: 1728)] + Univ. 3′ Motif |
| | TACGTGGGGGCGCG (SEQ ID NO: | [CGCGTCTCTACGTGGGGGCGCG |
| | 1178) | (Sequence Number: 1850)] |
| 1179 | GCCAGCATGGAGAACTGCCAGTTTTAGA | PE3 ngRNA (TGG PAM); contains |
| | GCTAGAAATAGCAAGTTAAAATAAGGCT | gRNA core SEQ ID NO: 1854, and |
| | AGTCCGTTATCAACTTGAAAAAGTGGCA | Linker [AACATTGA (Sequence |
| | CCGAGTCGGTGCAACATTGACGCGTCTC | Number: 1728)] + Univ. 3′ Motif |
| | TACGTGGGGGCGCG (SEQ ID NO: | [CGCGTCTCTACGTGGGGGCGCG |
| | 1179) | (Sequence Number: 1850)] |
| 1180 | AAACATGTAGGCGGCCAGCAGTTTTAGA | PE3 ngRNA (TGG PAM); contains |
| | GCTAGAAATAGCAAGTTAAAATAAGGCT | gRNA core SEQ ID NO: 1854, and |
| | AGTCCGTTATCAACTTGAAAAAGTGGCA | Linker [AACATTGA (Sequence |
| | CCGAGTCGGTGCAACATTGACGCGTCTC | Number: 1728)] + Univ. 3′ Motif |
| | TACGTGGGGGCGCG (SEQ ID NO: | [CGCGTCTCTACGTGGGGGCGCG |
| | 1180) | (Sequence Number: 1850)] |
| 1181 | GATCAGCAGAAACATGTAGGGTTTTAGA | PE3 ngRNA (CGG PAM); contains |
| | GCTAGAAATAGCAAGTTAAAATAAGGCT | gRNA core SEQ ID NO: 1854, and |
| | AGTCCGTTATCAACTTGAAAAAGTGGCA | Linker [AACATTGA (Sequence |
| | CCGAGTCGGTGCAACATTGACGCGTCTC | Number: 1728)] + Univ. 3′ Motif |
| | TACGTGGGGGCGCG (SEQ ID NO: | [CGCGTCTCTACGTGGGGGCGCG |
| | 1181) | (Sequence Number: 1850)] |
| 1182 | CACGATCAGCAGAAACATGTGTTTTAGA | PE3 ngRNA (AGG PAM); contains |
| | GCTAGAAATAGCAAGTTAAAATAAGGCT | gRNA core SEQ ID NO: 1854, and |
| | AGTCCGTTATCAACTTGAAAAAGTGGCA | Linker [AACATTGA (Sequence |
| | CCGAGTCGGTGCAACATTGACGCGTCTC | Number: 1728)] + Univ. 3′ Motif |
| | TACGTGGGGGCGCG (SEQ ID NO: | [CGCGTCTCTACGTGGGGGCGCG |
| | 1182) | (Sequence Number: 1850)] |
| 1183 | AGAGCGTGAGGAAGTTGATGGTTTTAGA | PE3 ngRNA (GGG PAM); contains |
| | GCTAGAAATAGCAAGTTAAAATAAGGCT | gRNA core SEQ ID NO: 1854, and |
| | AGTCCGTTATCAACTTGAAAAAGTGGCA | Linker [AACATTGA (Sequence |
| | CCGAGTCGGTGCAACATTGACGCGTCTC | Number: 1728)] + Univ. 3′ Motif |
| | TACGTGGGGGCGCG (SEQ ID NO: | [CGCGTCTCTACGTGGGGGCGCG |
| | 1183) | (Sequence Number: 1850)] |
| 1184 | GGCTCAGCCAGGTAGTACTGGTTTTAGA | PE3 ngRNA (TGG PAM); contains |
| | GCTAGAAATAGCAAGTTAAAATAAGGCT | gRNA core SEQ ID NO: 1854, Linker |
| | AGTCCGTTATCAACTTGAAAAAGTGGCA | [AACATTGA (Sequence Number: |
| | CCGAGTCGGTGCAACATTGACGCGTCTC | 1728)] + Univ. 3′ Motif |
| | TACGTGGGGGCGCGTTTTTTT (SEQ | [CGCGTCTCTACGTGGGGGCGCG |
| | ID NO: 1184) | (Sequence Number: 1850)], and |
| | | transcription adaptations |
| 1186 | GAGAACTGCCATGGCTCAGCCGTTTTAG | PE3 ngRNA (AGG PAM); contains |
| | AGCTAGAAATAGCAAGTTAAAATAAGGC | gRNA core SEQ ID NO: 1854, Linker |
| | TAGTCCGTTATCAACTTGAAAAAGTGGC | [AACATTGA (Sequence Number: |
| | ACCGAGTCGGTGCAACATTGACGCGTCT | 1728)] + Univ. 3′ Motif |
| | CTACGTGGGGGCGCGTTTTTTT (SEQ | [CGCGTCTCTACGTGGGGGCGCG |
| | ID NO: 1186) | (Sequence Number: 1850)], and |
| | | transcription adaptations |

TABLE 5

| Sequence | | |
|---|---|---|
| Number | Sequence | Description |
| 1330 | TCAGCCAGGTAGTACTG (SEQ ID NO: | PEgRNA spacer (TGG PAM) |
| | 1330) | |
| 1331 | CTCAGCCAGGTAGTACTG (SEQ ID NO: | PERNA spacer (TGG PAM) |
| | 1331) | |
| 1332 | GCTCAGCCAGGTAGTACTG (SEQ ID | PEgRNA spacer (TGG PAM) |
| | NO: 1332) | |
| 855 | GGCTCAGCCAGGTAGTACTG (SEQ ID | PEgRNA spacer (TGG PAM) |
| | NO: 855) | |
| 1333 | TGGCTCAGCCAGGTAGTACTG (SEQ ID | PEgRNA spacer (TGG PAM) |
| | NO: 1333) | |
| 1334 | ATGGCTCAGCCAGGTAGTACTG (SEQ | PERNA spacer (TGG PAM) |
| | ID NO: 1334) | |
| 1335 | TACTA | PBS |
| 1336 | TACTAC | PBS |
| 1337 | TACTACC | PBS |
| 1338 | TACTACCT | PBS |
| 1339 | TACTACCTG | PBS |
| 1340 | TACTACCTGG (SEQ ID NO: 1340) | PBS |
| 1341 | TACTACCTGGC (SEQ ID NO: 1341) | PBS |
| 1342 | TACTACCTGGCT (SEQ ID NO: 1342) | PBS |
| 1343 | TACTACCTGGCTG (SEQ ID NO: 1343) | PBS |
| 1344 | TACTACCTGGCTGA (SEQ ID NO: 1344) | PBS |
| 1345 | TACTACCTGGCTGAG (SEQ ID NO: | PBS |
| | 1345) | |
| 1346 | TACTACCTGGCTGAGC (SEQ ID NO: | PBS |
| | 1346) | |
| 1347 | TACTACCTGGCTGAGCC (SEQ ID NO: | PBS |
| | 1347) | |
| 1348 | TACTACCTGGCTGAGCCA (SEQ ID NO: | PBS |
| | 1348) | |
| 1349 | TACTACCTGGCTGAGCCAT (SEQ ID | PBS |
| | NO: 1349) | |
| 1350 | CCTTCGAGTACCCACAG (SEQ ID NO: | RTT |
| | 1350) | |
| 1351 | CCCTTCGAGTACCCACAG (SEQ ID NO: | RTT |
| | 1351) | |
| 1352 | CCCCTTCGAGTACCCACAG (SEQ ID | RTT |
| | NO: 1352) | |
| 1353 | GCCCCTTCGAGTACCCACAG (SEQ ID | RTT |
| | NO: 1353) | |
| 1354 | AGCCCCTTCGAGTACCCACAG (SEQ ID | RTT |
| | NO: 1354) | |
| 1355 | CAGCCCCTTCGAGTACCCACAG (SEQ | RTT |
| | ID NO: 1355) | |
| 1356 | GCAGCCCCTTCGAGTACCCACAG (SEQ | RTT |
| | ID NO: 1356) | |
| 1357 | CGCAGCCCCTTCGAGTACCCACAG | RTT |
| | (SEQ ID NO: 1357) | |
| 1358 | ACGCAGCCCCTTCGAGTACCCACAG | RTT |
| | (SEQ ID NO: 1358) | |
| 1359 | TACGCAGCCCCTTCGAGTACCCACAG | RTT |
| | (SEQ ID NO: 1359) | |
| 1360 | GTACGCAGCCCCTTCGAGTACCCACA | RTT |
| | G (SEQ ID NO: 1360) | |
| 1361 | GGTACGCAGCCCCTTCGAGTACCCAC | RTT |
| | AG (SEQ ID NO: 1361) | |
| 1362 | TGGTACGCAGCCCCTTCGAGTACCCA | RTT |
| | CAG (SEQ ID NO: 1362) | |
| 1363 | GTGGTACGCAGCCCCTTCGAGTACCC | RTT |
| | ACAG (SEQ ID NO: 1363) | |
| 1364 | TGTGGTACGCAGCCCCTTCGAGTACC | RTT |
| | CACAG (SEQ ID NO: 1364) | |
| 1365 | GTGTGGTACGCAGCCCCTTCGAGTAC | RTT |
| | CCACAG (SEQ ID NO: 1365) | |
| 1366 | GGTGTGGTACGCAGCCCCTTCGAGTA | RTT |
| | CCCACAG (SEQ ID NO: 1366) | |
| 1367 | GGGTGTGGTACGCAGCCCCTTCGAGT | RTT |
| | ACCCACAG (SEQ ID NO: 1367) | |
| 1368 | CGGGTGTGGTACGCAGCCCCTTCGAG | RTT |
| | TACCCACAG (SEQ ID NO: 1368) | |
| 1369 | ACGGGTGTGGTACGCAGCCCCTTCGA | RTT |
| | GTACCCACAG (SEQ ID NO: 1369) | |
| 1370 | GACGGGTGTGGTACGCAGCCCCTTCG | RTT |
| | AGTACCCACAG (SEQ ID NO: 1370) | |
| 1371 | CGACGGGTGTGGTACGCAGCCCCTTC | RTT |
| | GAGTACCCACAG (SEQ ID NO: 1371) | |
| 1372 | GCGACGGGTGTGGTACGCAGCCCCTT | RTT |
| | CGAGTACCCACAG (SEQ ID NO: 1372) | |
| 1373 | TGCGACGGGTGTGGTACGCAGCCCCT | RTT |
| | TCGAGTACCCACAG (SEQ ID NO: 1373) | |
| 72 | ACAAGGGCCACAGCCATGAA (SEQ ID | PE3 ngRNA spacer (TGG PAM) |
| | NO: 72) | |
| 73 | ACAGCCATGAATGGCACAGA (SEQ ID | PE3 ngRNA spacer (AGG PAM) |
| | NO: 73) | |
| 74 | CAGCCACGGGTCAGCCACAA (SEQ ID | PE3 ngRNA spacer (GGG PAM) |
| | NO: 74) | |
| 75 | CGTGCCCTTCTCCAATGCGA (SEQ ID | PE3 ngRNA spacer (CGG PAM) |
| | NO: 75) | |
| 76 | CTTCTCCAATGCGACGGGTG (SEQ ID | PE3 ngRNA spacer (TGG PAM) |
| | NO: 76) | |
| 77 | GCAGCCACGGGTCAGCCACA (SEQ ID | PE3 ngRNA spacer (AGG PAM) |
| | NO: 77) | |
| 78 | GTGCCCTTCTCCAATGCGAC (SEQ ID | PE3 ngRNA spacer (GGG PAM) |
| | NO: 78) | |
| 79 | TCTTGGGTGGGAGCAGCCAC (SEQ ID | PE3 ngRNA spacer (GGG PAM) |
| | NO: 79) | |
| 80 | TTCTTGGGTGGGAGCAGCCA (SEQ ID | PE3 ngRNA spacer (CGG PAM) |
| | NO: 80) | |
| 1374 | GGCTCAGCCAGGTAGTACTGGTTTTA | pegRNA; contains gRNA core SEQ |
| | GAGCTAGAAATAGCAAGTTAAAATAA | ID NO: 1854 |
| | GGCTAGTCCGTTATCAACTTGAAAAA | |
| | GTGGCACCGAGTCGGTGCAGCCCCTT | |
| | CGAGTACCCACAGTACTACCT (SEQ ID | |
| | NO: 1374) | |
| 1375 | GGCTCAGCCAGGTAGTACTGGTTTTA | pegRNA; contains gRNA core SEQ |
| | GAGCTAGAAATAGCAAGTTAAAATAA | ID NO: 1854 |
| | GGCTAGTCCGTTATCAACTTGAAAAA | |
| | GTGGCACCGAGTCGGTGCGCAGCCCC | |
| | TTCGAGTACCCACAGTACTACCT (SEQ | |
| | ID NO: 1375) | |
| 1376 | GGCTCAGCCAGGTAGTACTGGTTTTA | pegRNA; contains gRNA core SEQ |
| | GAGCTAGAAATAGCAAGTTAAAATAA | ID NO: 1854 |
| | GGCTAGTCCGTTATCAACTTGAAAAA | |
| | GTGGCACCGAGTCGGTGCAGCCCCTT | |
| | CGAGTACCCACAGTACTACCTGG (SEQ | |
| | ID NO: 1376) | |
| 1377 | GGCTCAGCCAGGTAGTACTGGTTTTA | pegRNA; contains gRNA core SEQ |
| | GAGCTAGAAATAGCAAGTTAAAATAA | ID NO: 1854, and TTTT (sequence |
| | GGCTAGTCCGTTATCAACTTGAAAAA | number 1860) 3′ terminal sequence |
| | GTGGCACCGAGTCGGTGCAGCCCCTT | |
| | CGAGTACCCACAGTACTACCTTTTT | |
| | (SEQ ID NO: 1377) | |
| 1378 | GGCTCAGCCAGGTAGTACTGGTTTTA | pegRNA; contains gRNA core SEQ |
| | GAGCTAGAAATAGCAAGTTAAAATAA | ID NO: 1854 |
| | GGCTAGTCCGTTATCAACTTGAAAAA | |
| | GTGGCACCGAGTCGGTGCACGCAGCC | |
| | CCTTCGAGTACCCACAGTACTACCT | |
| | (SEQ ID NO: 1378) | |
| 1379 | GGCTCAGCCAGGTAGTACTGGTTTTA | pegRNA; contains gRNA core SEQ |
| | GAGCTAGAAATAGCAAGTTAAAATAA | ID NO: 1854 |
| | GGCTAGTCCGTTATCAACTTGAAAAA | |
| | GTGGCACCGAGTCGGTGCGCAGCCCC | |
| | TTCGAGTACCCACAGTACTACCTGG | |
| | (SEQ ID NO: 1379) | |
| 1380 | GGCTCAGCCAGGTAGTACTGGTTTTA | pegRNA; contains gRNA core SEQ |
| | GAGCTAGAAATAGCAAGTTAAAATAA | ID NO: 1854 |
| | GGCTAGTCCGTTATCAACTTGAAAAA | |
| | GTGGCACCGAGTCGGTGCAGCCCCTT | |
| | CGAGTACCCACAGTACTACCTGGCT | |
| | (SEQ ID NO: 1380) | |
| 1381 | GGCTCAGCCAGGTAGTACTGGTTTTA | pegRNA; contains gRNA core SEQ |
| | GAGCTAGAAATAGCAAGTTAAAATAA | ID NO: 1854 |
| | GGCTAGTCCGTTATCAACTTGAAAAA | |
| | GTGGCACCGAGTCGGTGCTACGCAGC | |
| | CCCTTCGAGTACCCACAGTACTACCT | |
| | (SEQ ID NO: 1381) | |
| 1382 | GGCTCAGCCAGGTAGTACTGGTTTTA | pegRNA; contains gRNA core SEQ |
| | GAGCTAGAAATAGCAAGTTAAAATAA | ID NO: 1854, and TTTT (sequence |
| | GGCTAGTCCGTTATCAACTTGAAAAA | number 1860) 3′ terminal sequence |
| | GTGGCACCGAGTCGGTGCGCAGCCCC | |
| | TTCGAGTACCCACAGTACTACCTTTTT | |
| | (SEQ ID NO: 1382) | |
| 1383 | GGCTCAGCCAGGTAGTACTGGTTTTA | pegRNA; contains gRNA core SEQ |
| | GAGCTAGAAATAGCAAGTTAAAATAA | ID NO: 1854, and TTTT (sequence |
| | GGCTAGTCCGTTATCAACTTGAAAAA | number 1860) 3′ terminal sequence |
| | GTGGCACCGAGTCGGTGCAGCCCCTT | |
| | CGAGTACCCACAGTACTACCTGGTTTT | |
| | (SEQ ID NO: 1383) | |
| 1384 | GGCTCAGCCAGGTAGTACTGGTTTTA | pegRNA; contains gRNA core SEQ |
| | GAGCTAGAAATAGCAAGTTAAAATAA | ID NO: 1854 |
| | GGCTAGTCCGTTATCAACTTGAAAAA | |
| | GTGGCACCGAGTCGGTGCGTACGCAG | |
| | CCCCTTCGAGTACCCACAGTACTACCT | |
| | (SEQ ID NO: 1384) | |
| 1385 | GGCTCAGCCAGGTAGTACTGGTTTTA | pegRNA; contains gRNA core SEQ |
| | GAGCTAGAAATAGCAAGTTAAAATAA | ID NO: 1854 |
| | GGCTAGTCCGTTATCAACTTGAAAAA | |
| | GTGGCACCGAGTCGGTGCACGCAGCC | |
| | CCTTCGAGTACCCACAGTACTACCTG | |
| | G (SEQ ID NO: 1385) | |
| 1386 | GGCTCAGCCAGGTAGTACTGGTTTTA | pegRNA; contains gRNA core SEQ |
| | GAGCTAGAAATAGCAAGTTAAAATAA | ID NO: 1854 |
| | GGCTAGTCCGTTATCAACTTGAAAAA | |
| | GTGGCACCGAGTCGGTGCGCAGCCCC | |
| | TTCGAGTACCCACAGTACTACCTGGCT | |
| | (SEQ ID NO: 1386) | |
| 1387 | GGCTCAGCCAGGTAGTACTGGTTTTA | pegRNA; contains gRNA core SEQ |
| | GAGCTAGAAATAGCAAGTTAAAATAA | ID NO: 1854 |
| | GGCTAGTCCGTTATCAACTTGAAAAA | |
| | GTGGCACCGAGTCGGTGCAGCCCCTT | |
| | CGAGTACCCACAGTACTACCTGGCTG | |
| | A (SEQ ID NO: 1387) | |
| 1388 | GGCTCAGCCAGGTAGTACTGGTTTTA | pegRNA; contains gRNA core SEQ |
| | GAGCTAGAAATAGCAAGTTAAAATAA | ID NO: 1854 |
| | GGCTAGTCCGTTATCAACTTGAAAAA | |
| | GTGGCACCGAGTCGGTGCTACGCAGC | |
| | CCCTTCGAGTACCCACAGTACTACCTG | |
| | G (SEQ ID NO: 1388) | |
| 1389 | GGCTCAGCCAGGTAGTACTGGTTTTA | pegRNA; contains gRNA core SEQ |
| | GAGCTAGAAATAGCAAGTTAAAATAA | ID NO: 1854 |
| | GGCTAGTCCGTTATCAACTTGAAAAA | |
| | GTGGCACCGAGTCGGTGCGGTACGCA | |
| | GCCCCTTCGAGTACCCACAGTACTAC | |
| | CT (SEQ ID NO: 1389) | |
| 1390 | GGCTCAGCCAGGTAGTACTGGTTTTA | pegRNA; contains gRNA core SEQ |
| | GAGCTAGAAATAGCAAGTTAAAATAA | ID NO: 1854, and TTTT (sequence |
| | GGCTAGTCCGTTATCAACTTGAAAAA | number 1860) 3′ terminal sequence |
| | GTGGCACCGAGTCGGTGCACGCAGCC | |
| | CCTTCGAGTACCCACAGTACTACCTTT | |
| | TT (SEQ ID NO: 1390) | |
| 1391 | GGCTCAGCCAGGTAGTACTGGTTTTA | pegRNA; contains gRNA core SEQ |
| | GAGCTAGAAATAGCAAGTTAAAATAA | ID NO: 1854, and TTTT (sequence |
| | GGCTAGTCCGTTATCAACTTGAAAAA | number 1860) 3′ terminal sequence |
| | GTGGCACCGAGTCGGTGCGCAGCCCC | |
| | TTCGAGTACCCACAGTACTACCTGGTT | |
| | TT (SEQ ID NO: 1391) | |
| 1392 | GGCTCAGCCAGGTAGTACTGGTTTTA | pegRNA; contains gRNA core SEQ |
| | GAGCTAGAAATAGCAAGTTAAAATAA | ID NO: 1854, and TTTT (sequence |
| | GGCTAGTCCGTTATCAACTTGAAAAA | number 1860) 3′ terminal sequence |
| | GTGGCACCGAGTCGGTGCAGCCCCTT | |
| | CGAGTACCCACAGTACTACCTGGCTTT | |
| | TT (SEQ ID NO: 1392) | |
| 1393 | GGCTCAGCCAGGTAGTACTGGTTTTA | pegRNA; contains gRNA core SEQ |
| | GAGCTAGAAATAGCAAGTTAAAATAA | ID NO: 1854 |
| | GGCTAGTCCGTTATCAACTTGAAAAA | |
| | GTGGCACCGAGTCGGTGCGTACGCAG | |
| | CCCCTTCGAGTACCCACAGTACTACCT | |
| | GG (SEQ ID NO: 1393) | |
| 1394 | GGCTCAGCCAGGTAGTACTGGTTTTA | pegRNA; contains gRNA core SEQ |
| | GAGCTAGAAATAGCAAGTTAAAATAA | ID NO: 1854 |
| | GGCTAGTCCGTTATCAACTTGAAAAA | |
| | GTGGCACCGAGTCGGTGCACGCAGCC | |
| | CCTTCGAGTACCCACAGTACTACCTG | |
| | GCT (SEQ ID NO: 1394) | |
| 1395 | GGCTCAGCCAGGTAGTACTGGTTTTA | pegRNA; contains gRNA core SEQ |
| | GAGCTAGAAATAGCAAGTTAAAATAA | ID NO: 1854 |
| | GGCTAGTCCGTTATCAACTTGAAAAA | |
| | GTGGCACCGAGTCGGTGCGCAGCCCC | |
| | TTCGAGTACCCACAGTACTACCTGGCT | |
| | GA (SEQ ID NO: 1395) | |
| 1396 | GGCTCAGCCAGGTAGTACTGGTTTTA | pegRNA; contains gRNA core SEQ |
| | GAGCTAGAAATAGCAAGTTAAAATAA | ID NO: 1854 |
| | GGCTAGTCCGTTATCAACTTGAAAAA | |
| | GTGGCACCGAGTCGGTGCTACGCAGC | |
| | CCCTTCGAGTACCCACAGTACTACCTG | |
| | GCT (SEQ ID NO: 1396) | |
| 1397 | GGCTCAGCCAGGTAGTACTGGTTTTA | pegRNA; contains gRNA core SEQ |
| | GAGCTAGAAATAGCAAGTTAAAATAA | ID NO: 1854 |
| | GGCTAGTCCGTTATCAACTTGAAAAA | |
| | GTGGCACCGAGTCGGTGCGGTACGCA | |
| | GCCCCTTCGAGTACCCACAGTACTAC | |
| | CTGG (SEQ ID NO: 1397) | |
| 1398 | GGCTCAGCCAGGTAGTACTGGTTTTA | pegRNA; contains gRNA core SEQ |
| | GAGCTAGAAATAGCAAGTTAAAATAA | ID NO: 1854 |
| | GGCTAGTCCGTTATCAACTTGAAAAA | |
| | GTGGCACCGAGTCGGTGCGTGGTACG | |
| | CAGCCCCTTCGAGTACCCACAGTACT | |
| | ACCT (SEQ ID NO: 1398) | |
| 1399 | GGCTCAGCCAGGTAGTACTGGTTTTA | pegRNA; contains gRNA core SEQ |
| | GAGCTAGAAATAGCAAGTTAAAATAA | ID NO: 1854, and TTTT (sequence |
| | GGCTAGTCCGTTATCAACTTGAAAAA | number 1860) 3′ terminal sequence |
| | GTGGCACCGAGTCGGTGCGTACGCAG | |
| | CCCCTTCGAGTACCCACAGTACTACCT | |
| | TTTT (SEQ ID NO: 1399) | |
| 1400 | GGCTCAGCCAGGTAGTACTGGTTTTA | pegRNA; contains gRNA core SEQ |
| | GAGCTAGAAATAGCAAGTTAAAATAA | ID NO: 1854, and TTTT (sequence |
| | GGCTAGTCCGTTATCAACTTGAAAAA | number 1860) 3′ terminal sequence |
| | GTGGCACCGAGTCGGTGCACGCAGCC | |
| | CCTTCGAGTACCCACAGTACTACCTG | |
| | GTTTT (SEQ ID NO: 1400) | |
| 1401 | GGCTCAGCCAGGTAGTACTGGTTTTA | pegRNA; contains gRNA core SEQ |
| | GAGCTAGAAATAGCAAGTTAAAATAA | ID NO: 1854, and TTTT (sequence |
| | GGCTAGTCCGTTATCAACTTGAAAAA | number 1860) 3′ terminal sequence |
| | GTGGCACCGAGTCGGTGCGCAGCCCC | |
| | TTCGAGTACCCACAGTACTACCTGGCT | |
| | TTTT (SEQ ID NO: 1401) | |
| 1402 | GGCTCAGCCAGGTAGTACTGGTTTTA | pegRNA; contains gRNA core SEQ |
| | GAGCTAGAAATAGCAAGTTAAAATAA | ID NO: 1854, and TTTT (sequence |
| | GGCTAGTCCGTTATCAACTTGAAAAA | number 1860) 3′ terminal sequence |
| | GTGGCACCGAGTCGGTGCAGCCCCTT | |
| | CGAGTACCCACAGTACTACCTGGCTG | |
| | ATTTT (SEQ ID NO: 1402) | |
| 1403 | GGCTCAGCCAGGTAGTACTGGTTTTA | pegRNA; contains gRNA core SEQ |
| | GAGCTAGAAATAGCAAGTTAAAATAA | ID NO: 1854 |
| | GGCTAGTCCGTTATCAACTTGAAAAA | |
| | GTGGCACCGAGTCGGTGCTACGCAGC | |
| | CCCTTCGAGTACCCACAGTACTACCTG | |
| | GCTG (SEQ ID NO: 1403) | |
| 1404 | GGCTCAGCCAGGTAGTACTGGTTTTA | pegRNA; contains gRNA core SEQ |
| | GAGCTAGAAATAGCAAGTTAAAATAA | ID NO: 1854 |
| | GGCTAGTCCGTTATCAACTTGAAAAA | |
| | GTGGCACCGAGTCGGTGCGTACGCAG | |
| | CCCCTTCGAGTACCCACAGTACTACCT | |
| | GGCT (SEQ ID NO: 1404) | |
| 1405 | GGCTCAGCCAGGTAGTACTGGTTTTA | pegRNA; contains gRNA core SEQ |
| | GAGCTAGAAATAGCAAGTTAAAATAA | ID NO: 1854 |
| | GGCTAGTCCGTTATCAACTTGAAAAA | |
| | GTGGCACCGAGTCGGTGCACGCAGCC | |
| | CCTTCGAGTACCCACAGTACTACCTG | |
| | GCTGA (SEQ ID NO: 1405) | |
| 1406 | GGCTCAGCCAGGTAGTACTGGTTTTA | pegRNA; contains gRNA core SEQ |
| | GAGCTAGAAATAGCAAGTTAAAATAA | ID NO: 1854 |
| | GGCTAGTCCGTTATCAACTTGAAAAA | |
| | GTGGCACCGAGTCGGTGCTACGCAGC | |
| | CCCTTCGAGTACCCACAGTACTACCTG | |
| | GCTGA (SEQ ID NO: 1406) | |
| 1407 | GGCTCAGCCAGGTAGTACTGGTTTTA | pegRNA; contains gRNA core SEQ |
| | GAGCTAGAAATAGCAAGTTAAAATAA | ID NO: 1854 |
| | GGCTAGTCCGTTATCAACTTGAAAAA | |
| | GTGGCACCGAGTCGGTGCGGTACGCA | |
| | GCCCCTTCGAGTACCCACAGTACTAC | |
| | CTGGCT (SEQ ID NO: 1407) | |
| 1408 | GGCTCAGCCAGGTAGTACTGGTTTTA | pegRNA; contains gRNA core SEQ |
| | GAGCTAGAAATAGCAAGTTAAAATAA | ID NO: 1854 |
| | GGCTAGTCCGTTATCAACTTGAAAAA | |
| | GTGGCACCGAGTCGGTGCGTGGTACG | |
| | CAGCCCCTTCGAGTACCCACAGTACT | |
| | ACCTGG (SEQ ID NO: 1408) | |
| 1409 | GGCTCAGCCAGGTAGTACTGGTTTTA | pegRNA; contains gRNA core SEQ |
| | GAGCTAGAAATAGCAAGTTAAAATAA | ID NO: 1854, and TTTT (sequence |
| | GGCTAGTCCGTTATCAACTTGAAAAA | number 1860) 3′ terminal sequence |
| | GTGGCACCGAGTCGGTGCGTACGCAG | |
| | CCCCTTCGAGTACCCACAGTACTACCT | |
| | GGTTTT (SEQ ID NO: 1409) | |
| 1410 | GGCTCAGCCAGGTAGTACTGGTTTTA | pegRNA; contains gRNA core SEQ |
| | GAGCTAGAAATAGCAAGTTAAAATAA | ID NO: 1854, and TTTT (sequence |
| | GGCTAGTCCGTTATCAACTTGAAAAA | number 1860) 3′ terminal sequence |
| | GTGGCACCGAGTCGGTGCACGCAGCC | |
| | CCTTCGAGTACCCACAGTACTACCTG | |
| | GCTTTTT (SEQ ID NO: 1410) | |
| 1411 | GGCTCAGCCAGGTAGTACTGGTTTTA | pegRNA; contains gRNA core SEQ |
| | GAGCTAGAAATAGCAAGTTAAAATAA | ID NO: 1854, and TTTT (sequence |
| | GGCTAGTCCGTTATCAACTTGAAAAA | number 1860) 3′ terminal sequence |
| | GTGGCACCGAGTCGGTGCGCAGCCCC | |
| | TTCGAGTACCCACAGTACTACCTGGCT | |
| | GATTTT (SEQ ID NO: 1411) | |
| 1412 | GGCTCAGCCAGGTAGTACTGGTTTTA | pegRNA; contains gRNA core SEQ |
| | GAGCTAGAAATAGCAAGTTAAAATAA | ID NO: 1854 |
| | GGCTAGTCCGTTATCAACTTGAAAAA | |
| | GTGGCACCGAGTCGGTGCTACGCAGC | |
| | CCCTTCGAGTACCCACAGTACTACCTG | |
| | GCTGAG (SEQ ID NO: 1412) | |
| 1413 | GGCTCAGCCAGGTAGTACTGGTTTTA | pegRNA; contains gRNA core SEQ |
| | GAGCTAGAAATAGCAAGTTAAAATAA | ID NO: 1854 |
| | GGCTAGTCCGTTATCAACTTGAAAAA | |
| | GTGGCACCGAGTCGGTGCGTACGCAG | |
| | CCCCTTCGAGTACCCACAGTACTACCT | |
| | GGCTGA (SEQ ID NO: 1413) | |
| 1414 | GGCTCAGCCAGGTAGTACTGGTTTTA | pegRNA; contains gRNA core SEQ |
| | GAGCTAGAAATAGCAAGTTAAAATAA | ID NO: 1854 |
| | GGCTAGTCCGTTATCAACTTGAAAAA | |
| | GTGGCACCGAGTCGGTGCGGTACGCA | |
| | GCCCCTTCGAGTACCCACAGTACTAC | |
| | CTGGCTGA (SEQ ID NO: 1414) | |
| 1415 | GGCTCAGCCAGGTAGTACTGGTTTTA | pegRNA; contains gRNA core SEQ |
| | GAGCTAGAAATAGCAAGTTAAAATAA | ID NO: 1854 |
| | GGCTAGTCCGTTATCAACTTGAAAAA | |
| | GTGGCACCGAGTCGGTGCGTGGTACG | |
| | CAGCCCCTTCGAGTACCCACAGTACT | |
| | ACCTGGCT (SEQ ID NO: 1415) | |
| 1416 | GGCTCAGCCAGGTAGTACTGGTTTTA | pegRNA; contains gRNA core SEQ |
| | GAGCTAGAAATAGCAAGTTAAAATAA | ID NO: 1854 |
| | GGCTAGTCCGTTATCAACTTGAAAAA | |
| | GTGGCACCGAGTCGGTGCTACGCAGC | |
| | CCCTTCGAGTACCCACAGTACTACCTG | |
| | GCTGAGC (SEQ ID NO: 1416) | |
| 1417 | GGCTCAGCCAGGTAGTACTGGTTTTA | pegRNA; contains gRNA core SEQ |
| | GAGCTAGAAATAGCAAGTTAAAATAA | ID NO: 1854, and TTTT (sequence |
| | GGCTAGTCCGTTATCAACTTGAAAAA | number 1860) 3′ terminal sequence |
| | GTGGCACCGAGTCGGTGCGTACGCAG | |
| | CCCCTTCGAGTACCCACAGTACTACCT | |
| | GGCTTTTT (SEQ ID NO: 1417) | |
| 1418 | GGCTCAGCCAGGTAGTACTGGTTTTA | pegRNA; contains gRNA core SEQ |
| | GAGCTAGAAATAGCAAGTTAAAATAA | ID NO: 1854, and TTTT (sequence |
| | GGCTAGTCCGTTATCAACTTGAAAAA | number 1860) 3′ terminal sequence |
| | GTGGCACCGAGTCGGTGCACGCAGCC | |
| | CCTTCGAGTACCCACAGTACTACCTG | |
| | GCTGATTTT (SEQ ID NO: 1418) | |
| 1419 | GGCTCAGCCAGGTAGTACTGGTTTTA | pegRNA; contains gRNA core SEQ |
| | GAGCTAGAAATAGCAAGTTAAAATAA | ID NO: 1854 |
| | GGCTAGTCCGTTATCAACTTGAAAAA | |
| | GTGGCACCGAGTCGGTGCGTGGTACG | |
| | CAGCCCCTTCGAGTACCCACAGTACT | |
| | ACCTGGCTGA (SEQ ID NO: 1419) | |
| 1420 | GGCTCAGCCAGGTAGTACTGGTTTTA | pegRNA; contains gRNA core SEQ |
| | GAGCTAGAAATAGCAAGTTAAAATAA | ID NO: 1854, and TTTT (sequence |
| | GGCTAGTCCGTTATCAACTTGAAAAA | number 1860) 3′ terminal sequence |
| | GTGGCACCGAGTCGGTGCGTACGCAG | |
| | CCCCTTCGAGTACCCACAGTACTACCT | |
| | GGCTGATTTT (SEQ ID NO: 1420) | |
| 1421 | GGCTCAGCCAGGTAGTACTGGTTTTA | pegRNA; contains gRNA core SEQ |
| | GAGCTAGAAATAGCAAGTTAAAATAA | ID NO: 1854, and Linker |
| | GGCTAGTCCGTTATCAACTTGAAAAA | [AACATTGA (Sequence Number: |
| | GTGGCACCGAGTCGGTGCTACGCAGC | 1728)] + Univ. 3′ Motif |
| | CCCTTCGAGTACCCACAGTACTACCTA | [CGCGTCTCTACGTGGGGGCGCG |
| | ACATTGACGCGTCTCTACGTGGGGGC | (Sequence Number: 1850)] |
| | GCG (SEQ ID NO: 1421) | |
| 1422 | GGCTCAGCCAGGTAGTACTGGTTTTA | pegRNA; contains gRNA core SEQ |
| | GAGCTAGAAATAGCAAGTTAAAATAA | ID NO: 1854, and Linker |
| | GGCTAGTCCGTTATCAACTTGAAAAA | [AACATTGA (Sequence Number: |
| | GTGGCACCGAGTCGGTGCTACGCAGC | 1728)] + Univ. 3′ Motif |
| | CCCTTCGAGTACCCACAGTACTACCTG | [CGCGTCTCTACGTGGGGGCGCG |
| | GAACATTGACGCGTCTCTACGTGGGG | (Sequence Number: 1850)] |
| | GCGCG (SEQ ID NO: 1422) | |
| 1423 | GGCTCAGCCAGGTAGTACTGGTTTTA | pegRNA; contains gRNA core SEQ |
| | GAGCTAGAAATAGCAAGTTAAAATAA | ID NO: 1854, and Linker |
| | GGCTAGTCCGTTATCAACTTGAAAAA | [AACATTGA (Sequence Number: |
| | GTGGCACCGAGTCGGTGCGGTACGCA | 1728)] + Univ. 3′ Motif |
| | GCCCCTTCGAGTACCCACAGTACTAC | [CGCGTCTCTACGTGGGGGCGCG |
| | CTAACATTGACGCGTCTCTACGTGGG | (Sequence Number: 1850)] |
| | GGCGCG (SEQ ID NO: 1423) | |
| 1424 | GGCTCAGCCAGGTAGTACTGGTTTTA | pegRNA; contains gRNA core SEQ |
| | GAGCTAGAAATAGCAAGTTAAAATAA | ID NO: 1854, and Linker |
| | GGCTAGTCCGTTATCAACTTGAAAAA | [AACATTGA (Sequence Number: |
| | GTGGCACCGAGTCGGTGCTACGCAGC | 1728)] + Univ. 3′ Motif |
| | CCCTTCGAGTACCCACAGTACTACCTG | [CGCGTCTCTACGTGGGGGCGCG |
| | GCTAACATTGACGCGTCTCTACGTGG | (Sequence Number: 1850)] |
| | GGGCGCG (SEQ ID NO: 1424) | |
| 1425 | GGCTCAGCCAGGTAGTACTGGTTTTA | pegRNA; contains gRNA core SEQ |
| | GAGCTAGAAATAGCAAGTTAAAATAA | ID NO: 1854, and Linker |
| | GGCTAGTCCGTTATCAACTTGAAAAA | [AACATTGA (Sequence Number: |
| | GTGGCACCGAGTCGGTGCGGTACGCA | 1728)] + Univ. 3′ Motif |
| | GCCCCTTCGAGTACCCACAGTACTAC | [CGCGTCTCTACGTGGGGGCGCG |
| | CTGGAACATTGACGCGTCTCTACGTG | (Sequence Number: 1850)] |
| | GGGGCGCG (SEQ ID NO: 1425) | |
| 1426 | GGCTCAGCCAGGTAGTACTGGTTTTA | pegRNA; contains gRNA core SEQ |
| | GAGCTAGAAATAGCAAGTTAAAATAA | ID NO: 1854, and Linker |
| | GGCTAGTCCGTTATCAACTTGAAAAA | [AACATTGA (Sequence Number: |
| | GTGGCACCGAGTCGGTGCGTGGTACG | 1728)] + Univ. 3′ Motif |
| | CAGCCCCTTCGAGTACCCACAGTACT | [CGCGTCTCTACGTGGGGGCGCG |
| | ACCTAACATTGACGCGTCTCTACGTG | (Sequence Number: 1850)] |
| | GGGGCGCG (SEQ ID NO: 1426) | |
| 1427 | GGCTCAGCCAGGTAGTACTGGTTTTA | pegRNA; contains gRNA core SEQ |
| | GAGCTAGAAATAGCAAGTTAAAATAA | ID NO: 1854, and Linker |
| | GGCTAGTCCGTTATCAACTTGAAAAA | [AACATTGA (Sequence Number: |
| | GTGGCACCGAGTCGGTGCTACGCAGC | 1728)] + Univ. 3′ Motif |
| | CCCTTCGAGTACCCACAGTACTACCTG | [CGCGTCTCTACGTGGGGGCGCG |
| | GCTGAACATTGACGCGTCTCTACGTG | (Sequence Number: 1850)] |
| | GGGGCGCG (SEQ ID NO: 1427) | |
| 1428 | GGCTCAGCCAGGTAGTACTGGTTTTA | pegRNA; contains gRNA core SEQ |
| | GAGCTAGAAATAGCAAGTTAAAATAA | ID NO: 1854, and Linker |
| | GGCTAGTCCGTTATCAACTTGAAAAA | [AACATTGA (Sequence Number: |
| | GTGGCACCGAGTCGGTGCTACGCAGC | 1728)] + Univ. 3′ Motif |
| | CCCTTCGAGTACCCACAGTACTACCTG | [CGCGTCTCTACGTGGGGGCGCG |
| | GCTGAAACATTGACGCGTCTCTACGT | (Sequence Number: 1850)] |
| | GGGGGCGCG (SEQ ID NO: 1428) | |
| 1429 | GGCTCAGCCAGGTAGTACTGGTTTTA | pegRNA; contains gRNA core SEQ |
| | GAGCTAGAAATAGCAAGTTAAAATAA | ID NO: 1854, and Linker |
| | GGCTAGTCCGTTATCAACTTGAAAAA | [AACATTGA (Sequence Number: |
| | GTGGCACCGAGTCGGTGCGGTACGCA | 1728)] + Univ. 3′ Motif |
| | GCCCCTTCGAGTACCCACAGTACTAC | [CGCGTCTCTACGTGGGGGCGCG |
| | CTGGCTAACATTGACGCGTCTCTACGT | (Sequence Number: 1850)] |
| | GGGGGCGCG (SEQ ID NO: 1429) | |
| 1430 | GGCTCAGCCAGGTAGTACTGGTTTTA | pegRNA; contains gRNA core SEQ |
| | GAGCTAGAAATAGCAAGTTAAAATAA | ID NO: 1854, and Linker |
| | GGCTAGTCCGTTATCAACTTGAAAAA | [AACATTGA (Sequence Number: |
| | GTGGCACCGAGTCGGTGCGTGGTACG | 1728)] + Univ. 3′ Motif |
| | CAGCCCCTTCGAGTACCCACAGTACT | [CGCGTCTCTACGTGGGGGCGCG |
| | ACCTGGAACATTGACGCGTCTCTACG | (Sequence Number: 1850)] |
| | TGGGGGCGCG (SEQ ID NO: 1430) | |
| 1431 | GGCTCAGCCAGGTAGTACTGGTTTTA | pegRNA; contains gRNA core SEQ |
| | GAGCTAGAAATAGCAAGTTAAAATAA | ID NO: 1854, and Linker |
| | GGCTAGTCCGTTATCAACTTGAAAAA | [AACATTGA (Sequence Number: |
| | GTGGCACCGAGTCGGTGCTACGCAGC | 1728)] + Univ. 3′ Motif |
| | CCCTTCGAGTACCCACAGTACTACCTG | [CGCGTCTCTACGTGGGGGCGCG |
| | GCTGAGAACATTGACGCGTCTCTACG | (Sequence Number: 1850)] |
| | TGGGGGCGCG (SEQ ID NO: 1431) | |
| 1432 | GGCTCAGCCAGGTAGTACTGGTTTTA | pegRNA; contains gRNA core SEQ |
| | GAGCTAGAAATAGCAAGTTAAAATAA | ID NO: 1854, and Linker |
| | GGCTAGTCCGTTATCAACTTGAAAAA | [AACATTGA (Sequence Number: |
| | GTGGCACCGAGTCGGTGCGGTACGCA | 1728)] + Univ. 3′ Motif |
| | GCCCCTTCGAGTACCCACAGTACTAC | [CGCGTCTCTACGTGGGGGCGCG |
| | CTGGCTGAAACATTGACGCGTCTCTA | (Sequence Number: 1850)] |
| | CGTGGGGGCGCG (SEQ ID NO: 1432) | |
| 1433 | GGCTCAGCCAGGTAGTACTGGTTTTA | pegRNA; contains gRNA core SEQ |
| | GAGCTAGAAATAGCAAGTTAAAATAA | ID NO: 1854, and Linker |
| | GGCTAGTCCGTTATCAACTTGAAAAA | [AACATTGA (Sequence Number: |
| | GTGGCACCGAGTCGGTGCGTGGTACG | 1728)] + Univ. 3′ Motif |
| | CAGCCCCTTCGAGTACCCACAGTACT | [CGCGTCTCTACGTGGGGGCGCG |
| | ACCTGGCTAACATTGACGCGTCTCTAC | (Sequence Number: 1850)] |
| | GTGGGGGCGCG (SEQ ID NO: 1433) | |
| 1434 | GGCTCAGCCAGGTAGTACTGGTTTTA | pegRNA; contains gRNA core SEQ |
| | GAGCTAGAAATAGCAAGTTAAAATAA | ID NO: 1854, and Linker |
| | GGCTAGTCCGTTATCAACTTGAAAAA | [AACATTGA (Sequence Number: |
| | GTGGCACCGAGTCGGTGCTACGCAGC | 1728)] + Univ. 3′ Motif |
| | CCCTTCGAGTACCCACAGTACTACCTG | [CGCGTCTCTACGTGGGGGCGCG |
| | GCTGAGCAACATTGACGCGTCTCTAC | (Sequence Number: 1850)] |
| | GTGGGGGCGCG (SEQ ID NO: 1434) | |
| 1435 | GGCTCAGCCAGGTAGTACTGGTTTTA | pegRNA; contains gRNA core SEQ |
| | GAGCTAGAAATAGCAAGTTAAAATAA | ID NO: 1854, and Linker |
| | GGCTAGTCCGTTATCAACTTGAAAAA | [AACATTGA (Sequence Number: |
| | GTGGCACCGAGTCGGTGCGTGGTACG | 1728)] + Univ. 3′ Motif |
| | CAGCCCCTTCGAGTACCCACAGTACT | [CGCGTCTCTACGTGGGGGCGCG |
| | ACCTGGCTGAAACATTGACGCGTCTC | (Sequence Number: 1850)] |
| | TACGTGGGGGCGCG (SEQ ID NO: 1435) | |
| 496 | CTTCTCCAATGCGACGGGTGGTTTTAG | PE3 ngRNA (TGG PAM); contains |
| | AGCTAGAAATAGCAAGTTAAAATAAG | gRNA core SEQ ID NO: 1854 |
| | GCTAGTCCGTTATCAACTTGAAAAAG | |
| | TGGCACCGAGTCGGTGC (SEQ ID NO: | |
| | 496) | |
| 497 | GTGCCCTTCTCCAATGCGACGTTTTAG | PE3 ngRNA (GGG PAM); contains |
| | AGCTAGAAATAGCAAGTTAAAATAAG | gRNA core SEQ ID NO: 1854 |
| | GCTAGTCCGTTATCAACTTGAAAAAG | |
| | TGGCACCGAGTCGGTGC (SEQ ID NO: | |
| | 497) | |
| 498 | CGTGCCCTTCTCCAATGCGAGTTTTAG | PE3 ngRNA (CGG PAM); contains |
| | AGCTAGAAATAGCAAGTTAAAATAAG | gRNA core SEQ ID NO: 1854 |
| | GCTAGTCCGTTATCAACTTGAAAAAG | |
| | TGGCACCGAGTCGGTGC (SEQ ID NO: | |
| | 498) | |
| 499 | ACAGCCATGAATGGCACAGAGTTTTA | PE3 ngRNA (AGG PAM); contains |
| | GAGCTAGAAATAGCAAGTTAAAATAA | gRNA core SEQ ID NO: 1854 |
| | GGCTAGTCCGTTATCAACTTGAAAAA | |
| | GTGGCACCGAGTCGGTGC (SEQ ID NO: | |
| | 499) | |
| 500 | ACAAGGGCCACAGCCATGAAGTTTTA | PE3 ngRNA (TGG PAM); contains |
| | GAGCTAGAAATAGCAAGTTAAAATAA | gRNA core SEQ ID NO: 1854 |
| | GGCTAGTCCGTTATCAACTTGAAAAA | |
| | GTGGCACCGAGTCGGTGC (SEQ ID NO: | |
| | 500) | |
| 501 | CAGCCACGGGTCAGCCACAAGTTTTA | PE3 ngRNA (GGG PAM); contains |
| | GAGCTAGAAATAGCAAGTTAAAATAA | gRNA core SEQ ID NO: 1854 |
| | GGCTAGTCCGTTATCAACTTGAAAAA | |
| | GTGGCACCGAGTCGGTGC (SEQ ID NO: | |
| | 501) | |
| 502 | GCGTGCCCTTCTCCAATGCGAGTTTTA | PE3 ngRNA (CGG PAM); contains |
| | GAGCTAGAAATAGCAAGTTAAAATAA | gRNA core SEQ ID NO: 1854 |
| | GGCTAGTCCGTTATCAACTTGAAAAA | |
| | GTGGCACCGAGTCGGTGC (SEQ ID NO: | |
| | 502) | |
| 503 | GACAGCCATGAATGGCACAGAGTTTT | PE3 ngRNA (AGG PAM); contains |
| | AGAGCTAGAAATAGCAAGTTAAAATA | gRNA core SEQ ID NO: 1854 |
| | AGGCTAGTCCGTTATCAACTTGAAAA | |
| | AGTGGCACCGAGTCGGTGC (SEQ ID | |
| | NO: 503) | |
| 507 | CTTCTCCAATGCGACGGGTGGTTTTAG | PE3 ngRNA (TGG PAM); contains |
| | AGCTAGAAATAGCAAGTTAAAATAAG | gRNA core SEQ ID NO: 1854, and |
| | GCTAGTCCGTTATCAACTTGAAAAAG | Linker [AACATTGA (Sequence |
| | TGGCACCGAGTCGGTGCAACATTGAC | Number: 1728)] + Univ. 3′ Motif |
| | GCGTCTCTACGTGGGGGCGCG (SEQ ID | [CGCGTCTCTACGTGGGGGCGCG |
| | NO: 507) | (Sequence Number: 1850)] |
| 508 | GTGCCCTTCTCCAATGCGACGTTTTAG | PE3 ngRNA (GGG PAM); contains |
| | AGCTAGAAATAGCAAGTTAAAATAAG | gRNA core SEQ ID NO: 1854, and |
| | GCTAGTCCGTTATCAACTTGAAAAAG | Linker [AACATTGA (Sequence |
| | TGGCACCGAGTCGGTGCAACATTGAC | Number: 1728)] + Univ. 3′ Motif |
| | GCGTCTCTACGTGGGGGCGCG (SEQ ID | [CGCGTCTCTACGTGGGGGCGCG |
| | NO: 508) | (Sequence Number: 1850)] |
| 509 | CGTGCCCTTCTCCAATGCGAGTTTTAG | PE3 ngRNA (CGG PAM); contains |
| | AGCTAGAAATAGCAAGTTAAAATAAG | gRNA core SEQ ID NO: 1854, and |
| | GCTAGTCCGTTATCAACTTGAAAAAG | Linker [AACATTGA (Sequence |
| | TGGCACCGAGTCGGTGCAACATTGAC | Number: 1728)] + Univ. 3′ Motif |
| | GCGTCTCTACGTGGGGGCGCG (SEQ ID | [CGCGTCTCTACGTGGGGGCGCG |
| | NO: 509) | (Sequence Number: 1850)] |
| 510 | ACAGCCATGAATGGCACAGAGTTTTA | PE3 ngRNA (AGG PAM); contains |
| | GAGCTAGAAATAGCAAGTTAAAATAA | gRNA core SEQ ID NO: 1854, and |
| | GGCTAGTCCGTTATCAACTTGAAAAA | Linker [AACATTGA (Sequence |
| | GTGGCACCGAGTCGGTGCAACATTGA | Number: 1728)] + Univ. 3′ Motif |
| | CGCGTCTCTACGTGGGGGCGCG (SEQ | [CGCGTCTCTACGTGGGGGCGCG |
| | ID NO: 510) | (Sequence Number: 1850)] |
| 511 | ACAAGGGCCACAGCCATGAAGTTTTA | PE3 ngRNA (TGG PAM); contains |
| | GAGCTAGAAATAGCAAGTTAAAATAA | gRNA core SEQ ID NO: 1854, and |
| | GGCTAGTCCGTTATCAACTTGAAAAA | Linker [AACATTGA (Sequence |
| | GTGGCACCGAGTCGGTGCAACATTGA | Number: 1728)] + Univ. 3′ Motif |
| | CGCGTCTCTACGTGGGGGCGCG (SEQ | [CGCGTCTCTACGTGGGGGCGCG |
| | ID NO: 511) | (Sequence Number: 1850)] |
| 512 | CAGCCACGGGTCAGCCACAAGTTTTA | PE3 ngRNA (GGG PAM); contains |
| | GAGCTAGAAATAGCAAGTTAAAATAA | gRNA core SEQ ID NO: 1854, and |
| | GGCTAGTCCGTTATCAACTTGAAAAA | Linker [AACATTGA (Sequence |
| | GTGGCACCGAGTCGGTGCAACATTGA | Number: 1728)] + Univ. 3′ Motif |
| | CGCGTCTCTACGTGGGGGCGCG (SEQ | [CGCGTCTCTACGTGGGGGCGCG |
| | ID NO: 512) | (Sequence Number: 1850)] |
| 513 | GTGCCCTTCTCCAATGCGACGTTTTAG | PE3 ngRNA (GGG PAM); contains |
| | AGCTAGAAATAGCAAGTTAAAATAAG | gRNA core SEQ ID NO: 1854, Linker |
| | GCTAGTCCGTTATCAACTTGAAAAAG | [AACATTGA (Sequence Number: |
| | TGGCACCGAGTCGGTGCAACATTGAC | 1728)] + Univ. 3′ Motif |
| | GCGTCTCTACGTGGGGGCGCGTTTTTT | [CGCGTCTCTACGTGGGGGCGCG |
| | T (SEQ ID NO: 513) | (Sequence Number: 1850)], and |
| | | transcription adaptations |
| 514 | GCGTGCCCTTCTCCAATGCGAGTTTTA | PE3 ngRNA (CGG PAM); contains |
| | GAGCTAGAAATAGCAAGTTAAAATAA | gRNA core SEQ ID NO: 1854, Linker |
| | GGCTAGTCCGTTATCAACTTGAAAAA | [AACATTGA (Sequence Number: |
| | GTGGCACCGAGTCGGTGCAACATTGA | 1728)] + Univ. 3′ Motif |
| | CGCGTCTCTACGTGGGGGCGCGTTTTT | [CGCGTCTCTACGTGGGGGCGCG |
| | TT (SEQ ID NO: 514) | (Sequence Number: 1850)], and |
| | | transcription adaptations |
| 515 | GACAGCCATGAATGGCACAGAGTTTT | PE3 ngRNA (AGG PAM); contains |
| | AGAGCTAGAAATAGCAAGTTAAAATA | gRNA core SEQ ID NO: 1854, Linker |
| | AGGCTAGTCCGTTATCAACTTGAAAA | [AACATTGA (Sequence Number: |
| | AGTGGCACCGAGTCGGTGCAACATTG | 1728)] + Univ. 3′ Motif |
| | ACGCGTCTCTACGTGGGGGCGCGTTTT | [CGCGTCTCTACGTGGGGGCGCG |
| | TTT (SEQ ID NO: 515) | (Sequence Number: 1850)], and |
| | | transcription adaptations |

TABLE 6

| Sequence | | |
|---|---|---|
| Number | Sequence | Description |
| 1436 | CCCTTCTCCAATGCGAC (SEQ ID NO: | PEgRNA spacer (GGG PAM) |
| | 1436) | |
| 1437 | GCCCTTCTCCAATGCGAC (SEQ ID NO: | PEgRNA spacer (GGG PAM) |
| | 1437) | |
| 1438 | TGCCCTTCTCCAATGCGAC (SEQ ID | PEgRNA spacer (GGG PAM) |
| | NO: 1438) | |
| 78 | GTGCCCTTCTCCAATGCGAC (SEQ ID | PERNA spacer (GGG PAM) |
| | NO: 78) | |
| 1439 | CGTGCCCTTCTCCAATGCGAC (SEQ ID | PEgRNA spacer (GGG PAM) |
| | NO: 1439) | |
| 1440 | ACGTGCCCTTCTCCAATGCGAC (SEQ | PEgRNA spacer (GGG PAM) |
| | ID NO: 1440) | |
| 1441 | GCATT | PBS |
| 1442 | GCATTG | PBS |
| 1443 | GCATTGG | PBS |
| 1444 | GCATTGGA | PBS |
| 1445 | GCATTGGAG | PBS |
| 1446 | GCATTGGAGA (SEQ ID NO: 1446) | PBS |
| 1447 | GCATTGGAGAA (SEQ ID NO: 1447) | PBS |
| 1448 | GCATTGGAGAAG (SEQ ID NO: 1448) | PBS |
| 1449 | GCATTGGAGAAGG (SEQ ID NO: 1449) | PBS |
| 1450 | GCATTGGAGAAGGG (SEQ ID NO: 1450) | PBS |
| 1451 | GCATTGGAGAAGGGC (SEQ ID NO: | PBS |
| | 1451) | |
| 1452 | GCATTGGAGAAGGGCA (SEQ ID NO: | PBS |
| | 1452) | |
| 1453 | GCATTGGAGAAGGGCAC (SEQ ID NO: | PBS |
| | 1453) | |
| 1454 | GCATTGGAGAAGGGCACG (SEQ ID | PBS |
| | NO: 1454) | |
| 1455 | GCATTGGAGAAGGGCACGT (SEQ ID | PBS |
| | NO: 1455) | |
| 1456 | GGGCTGCGTACCACACCCGTC (SEQ ID | RTT |
| | NO: 1456) | |
| 1457 | GGGGCTGCGTACCACACCCGTC (SEQ | RTT |
| | ID NO: 1457) | |
| 1458 | AGGGGCTGCGTACCACACCCGTC (SEQ | RTT |
| | ID NO: 1458) | |
| 1459 | AAGGGGCTGCGTACCACACCCGTC | RTT |
| | (SEQ ID NO: 1459) | |
| 1460 | GAAGGGGCTGCGTACCACACCCGTC | RTT |
| | (SEQ ID NO: 1460) | |
| 1461 | CGAAGGGGCTGCGTACCACACCCGTC | RTT |
| | (SEQ ID NO: 1461) | |
| 1462 | TCGAAGGGGCTGCGTACCACACCCGT | RTT |
| | C (SEQ ID NO: 1462) | |
| 1463 | CTCGAAGGGGCTGCGTACCACACCCG | RTT |
| | TC (SEQ ID NO: 1463) | |
| 1464 | ACTCGAAGGGGCTGCGTACCACACCC | RTT |
| | GTC (SEQ ID NO: 1464) | |
| 1465 | TACTCGAAGGGGCTGCGTACCACACC | RTT |
| | CGTC (SEQ ID NO: 1465) | |
| 1466 | GTACTCGAAGGGGCTGCGTACCACAC | RTT |
| | CCGTC (SEQ ID NO: 1466) | |
| 1467 | GGTACTCGAAGGGGCTGCGTACCACA | RTT |
| | CCCGTC (SEQ ID NO: 1467) | |
| 1468 | GGGTACTCGAAGGGGCTGCGTACCAC | RTT |
| | ACCCGTC (SEQ ID NO: 1468) | |
| 1469 | TGGGTACTCGAAGGGGCTGCGTACCA | RTT |
| | CACCCGTC (SEQ ID NO: 1469) | |
| 1470 | GTGGGTACTCGAAGGGGCTGCGTACC | RTT |
| | ACACCCGTC (SEQ ID NO: 1470) | |
| 1471 | TGTGGGTACTCGAAGGGGCTGCGTAC | RTT |
| | CACACCCGTC (SEQ ID NO: 1471) | |
| 1472 | CTGTGGGTACTCGAAGGGGCTGCGTA | RTT |
| | CCACACCCGTC (SEQ ID NO: 1472) | |
| 1473 | ACTGTGGGTACTCGAAGGGGCTGCGT | RTT |
| | ACCACACCCGTC (SEQ ID NO: 1473) | |
| 1474 | TACTGTGGGTACTCGAAGGGGCTGCG | RTT |
| | TACCACACCCGTC (SEQ ID NO: 1474) | |
| 1475 | GTACTGTGGGTACTCGAAGGGGCTGC | RTT |
| | GTACCACACCCGTC (SEQ ID NO: 1475) | |
| 849 | AAACATGTAGGCGGCCAGCA (SEQ ID | PE3 ngRNA spacer (TGG PAM) |
| | NO: 849) | |
| 850 | AGAACTGCCATGGCTCAGCC (SEQ ID | PE3 ngRNA spacer (AGG PAM) |
| | NO: 850) | |
| 851 | AGAGCGTGAGGAAGTTGATG (SEQ ID | PE3 ngRNA spacer (GGG PAM) |
| | NO: 851) | |
| 520 | AGTACTGTGGGTACTCGAAG (SEQ ID | PE3 ngRNA spacer (TGG PAM) |
| | NO: 520) | |
| 852 | CACGATCAGCAGAAACATGT (SEQ ID | PE3 ngRNA spacer (AGG PAM) |
| | NO: 852) | |
| 853 | GATCAGCAGAAACATGTAGG (SEQ ID | PE3 ngRNA spacer (CGG PAM) |
| | NO: 853) | |
| 854 | GCCAGCATGGAGAACTGCCA (SEQ ID | PE3 ngRNA spacer (TGG PAM) |
| | NO: 854) | |
| 4 | GCTCAGCCAGGTAGTACTGT (SEQ ID | PE3 ngRNA spacer (GGG PAM) |
| | NO: 4) | |
| 855 | GGCTCAGCCAGGTAGTACTG (SEQ ID | PE3 ngRNA spacer (TGG PAM) |
| | NO: 855) | |
| 856 | GTAGAGCGTGAGGAAGTTGA (SEQ ID | PE3 ngRNA spacer (TGG PAM) |
| | NO: 856) | |
| 857 | TAGAGCGTGAGGAAGTTGAT (SEQ ID | PE3 ngRNA spacer (GGG PAM) |
| | NO: 857) | |
| 858 | GGACGGTGACGTAGAGCGTG (SEQ ID | PE3 ngRNA spacer (AGG PAM) |
| | NO: 858) | |
| 1476 | GTGCCCTTCTCCAATGCGACGTTTTAG | pegRNA; contains gRNA core SEQ |
| | AGCTAGAAATAGCAAGTTAAAATAAG | ID NO: 1854 |
| | GCTAGTCCGTTATCAACTTGAAAAAG | |
| | TGGCACCGAGTCGGTGCGAAGGGGCT | |
| | GCGTACCACACCCGTCGCATTGGA | |
| | (SEQ ID NO: 1476) | |
| 1477 | GTGCCCTTCTCCAATGCGACGTTTTAG | pegRNA; contains gRNA core SEQ |
| | AGCTAGAAATAGCAAGTTAAAATAAG | ID NO: 1854 |
| | GCTAGTCCGTTATCAACTTGAAAAAG | |
| | TGGCACCGAGTCGGTGCTCGAAGGGG | |
| | CTGCGTACCACACCCGTCGCATTGGA | |
| | (SEQ ID NO: 1477) | |
| 1478 | GTGCCCTTCTCCAATGCGACGTTTTAG | pegRNA; contains gRNA core SEQ |
| | AGCTAGAAATAGCAAGTTAAAATAAG | ID NO: 1854 |
| | GCTAGTCCGTTATCAACTTGAAAAAG | |
| | TGGCACCGAGTCGGTGCGAAGGGGCT | |
| | GCGTACCACACCCGTCGCATTGGAGA | |
| | (SEQ ID NO: 1478) | |
| 1479 | GTGCCCTTCTCCAATGCGACGTTTTAG | pegRNA; contains gRNA core SEQ |
| | AGCTAGAAATAGCAAGTTAAAATAAG | ID NO: 1854, and TTTT (sequence |
| | GCTAGTCCGTTATCAACTTGAAAAAG | number 1860) 3′ terminal sequence |
| | TGGCACCGAGTCGGTGCGAAGGGGCT | |
| | GCGTACCACACCCGTCGCATTGGATTT | |
| | T (SEQ ID NO: 1479) | |
| 1480 | GTGCCCTTCTCCAATGCGACGTTTTAG | pegRNA; contains gRNA core SEQ |
| | AGCTAGAAATAGCAAGTTAAAATAAG | ID NO: 1854 |
| | GCTAGTCCGTTATCAACTTGAAAAAG | |
| | TGGCACCGAGTCGGTGCACTCGAAGG | |
| | GGCTGCGTACCACACCCGTCGCATTG | |
| | GA (SEQ ID NO: 1480) | |
| 1481 | GTGCCCTTCTCCAATGCGACGTTTTAG | pegRNA; contains gRNA core SEQ |
| | AGCTAGAAATAGCAAGTTAAAATAAG | ID NO: 1854 |
| | GCTAGTCCGTTATCAACTTGAAAAAG | |
| | TGGCACCGAGTCGGTGCTCGAAGGGG | |
| | CTGCGTACCACACCCGTCGCATTGGA | |
| | GA (SEQ ID NO: 1481) | |
| 1482 | GTGCCCTTCTCCAATGCGACGTTTTAG | pegRNA; contains gRNA core SEQ |
| | AGCTAGAAATAGCAAGTTAAAATAAG | ID NO: 1854 |
| | GCTAGTCCGTTATCAACTTGAAAAAG | |
| | TGGCACCGAGTCGGTGCGAAGGGGCT | |
| | GCGTACCACACCCGTCGCATTGGAGA | |
| | AG (SEQ ID NO: 1482) | |
| 1483 | GTGCCCTTCTCCAATGCGACGTTTTAG | pegRNA; contains gRNA core SEQ |
| | AGCTAGAAATAGCAAGTTAAAATAAG | ID NO: 1854 |
| | GCTAGTCCGTTATCAACTTGAAAAAG | |
| | TGGCACCGAGTCGGTGCTACTCGAAG | |
| | GGGCTGCGTACCACACCCGTCGCATT | |
| | GGA (SEQ ID NO: 1483) | |
| 1484 | GTGCCCTTCTCCAATGCGACGTTTTAG | pegRNA; contains gRNA core SEQ |
| | AGCTAGAAATAGCAAGTTAAAATAAG | ID NO: 1854, and TTTT (sequence |
| | GCTAGTCCGTTATCAACTTGAAAAAG | number 1860) 3′ terminal sequence |
| | TGGCACCGAGTCGGTGCTCGAAGGGG | |
| | CTGCGTACCACACCCGTCGCATTGGA | |
| | TTTT (SEQ ID NO: 1484) | |
| 1485 | GTGCCCTTCTCCAATGCGACGTTTTAG | pegRNA; contains gRNA core SEQ |
| | AGCTAGAAATAGCAAGTTAAAATAAG | ID NO: 1854, and TTTT (sequence |
| | GCTAGTCCGTTATCAACTTGAAAAAG | number 1860) 3′ terminal sequence |
| | TGGCACCGAGTCGGTGCGAAGGGGCT | |
| | GCGTACCACACCCGTCGCATTGGAGA | |
| | TTTT (SEQ ID NO: 1485) | |
| 1486 | GTGCCCTTCTCCAATGCGACGTTTTAG | pegRNA; contains gRNA core SEQ |
| | AGCTAGAAATAGCAAGTTAAAATAAG | ID NO: 1854 |
| | GCTAGTCCGTTATCAACTTGAAAAAG | |
| | TGGCACCGAGTCGGTGCGTACTCGAA | |
| | GGGGCTGCGTACCACACCCGTCGCAT | |
| | TGGA (SEQ ID NO: 1486) | |
| 1487 | GTGCCCTTCTCCAATGCGACGTTTTAG | pegRNA; contains gRNA core SEQ |
| | AGCTAGAAATAGCAAGTTAAAATAAG | ID NO: 1854 |
| | GCTAGTCCGTTATCAACTTGAAAAAG | |
| | TGGCACCGAGTCGGTGCACTCGAAGG | |
| | GGCTGCGTACCACACCCGTCGCATTG | |
| | GAGA (SEQ ID NO: 1487) | |
| 1488 | GTGCCCTTCTCCAATGCGACGTTTTAG | pegRNA; contains gRNA core SEQ |
| | AGCTAGAAATAGCAAGTTAAAATAAG | ID NO: 1854 |
| | GCTAGTCCGTTATCAACTTGAAAAAG | |
| | TGGCACCGAGTCGGTGCTCGAAGGGG | |
| | CTGCGTACCACACCCGTCGCATTGGA | |
| | GAAG (SEQ ID NO: 1488) | |
| 1489 | GTGCCCTTCTCCAATGCGACGTTTTAG | pegRNA; contains gRNA core SEQ |
| | AGCTAGAAATAGCAAGTTAAAATAAG | ID NO: 1854 |
| | GCTAGTCCGTTATCAACTTGAAAAAG | |
| | TGGCACCGAGTCGGTGCGAAGGGGCT | |
| | GCGTACCACACCCGTCGCATTGGAGA | |
| | AGGG (SEQ ID NO: 1489) | |
| 1490 | GTGCCCTTCTCCAATGCGACGTTTTAG | pegRNA; contains gRNA core SEQ |
| | AGCTAGAAATAGCAAGTTAAAATAAG | ID NO: 1854 |
| | GCTAGTCCGTTATCAACTTGAAAAAG | |
| | TGGCACCGAGTCGGTGCTACTCGAAG | |
| | GGGCTGCGTACCACACCCGTCGCATT | |
| | GGAGA (SEQ ID NO: 1490) | |
| 1491 | GTGCCCTTCTCCAATGCGACGTTTTAG | pegRNA; contains gRNA core SEQ |
| | AGCTAGAAATAGCAAGTTAAAATAAG | ID NO: 1854, and TTTT (sequence |
| | GCTAGTCCGTTATCAACTTGAAAAAG | number 1860) 3′ terminal sequence |
| | TGGCACCGAGTCGGTGCACTCGAAGG | |
| | GGCTGCGTACCACACCCGTCGCATTG | |
| | GATTTT (SEQ ID NO: 1491) | |
| 1492 | GTGCCCTTCTCCAATGCGACGTTTTAG | pegRNA; contains gRNA core SEQ |
| | AGCTAGAAATAGCAAGTTAAAATAAG | ID NO: 1854, and TTTT (sequence |
| | GCTAGTCCGTTATCAACTTGAAAAAG | number 1860) 3′ terminal sequence |
| | TGGCACCGAGTCGGTGCTCGAAGGGG | |
| | CTGCGTACCACACCCGTCGCATTGGA | |
| | GATTTT (SEQ ID NO: 1492) | |
| 1493 | GTGCCCTTCTCCAATGCGACGTTTTAG | pegRNA; contains gRNA core SEQ |
| | AGCTAGAAATAGCAAGTTAAAATAAG | ID NO: 1854, and TTTT (sequence |
| | GCTAGTCCGTTATCAACTTGAAAAAG | number 1860) 3′ terminal sequence |
| | TGGCACCGAGTCGGTGCGAAGGGGCT | |
| | GCGTACCACACCCGTCGCATTGGAGA | |
| | AGTTTT (SEQ ID NO: 1493) | |
| 1494 | GTGCCCTTCTCCAATGCGACGTTTTAG | pegRNA; contains gRNA core SEQ |
| | AGCTAGAAATAGCAAGTTAAAATAAG | ID NO: 1854 |
| | GCTAGTCCGTTATCAACTTGAAAAAG | |
| | TGGCACCGAGTCGGTGCGTACTCGAA | |
| | GGGGCTGCGTACCACACCCGTCGCAT | |
| | TGGAGA (SEQ ID NO: 1494) | |
| 1495 | GTGCCCTTCTCCAATGCGACGTTTTAG | pegRNA; contains gRNA core SEQ |
| | AGCTAGAAATAGCAAGTTAAAATAAG | ID NO: 1854 |
| | GCTAGTCCGTTATCAACTTGAAAAAG | |
| | TGGCACCGAGTCGGTGCACTCGAAGG | |
| | GGCTGCGTACCACACCCGTCGCATTG | |
| | GAGAAG (SEQ ID NO: 1495) | |
| 1496 | GTGCCCTTCTCCAATGCGACGTTTTAG | pegRNA; contains gRNA core SEQ |
| | AGCTAGAAATAGCAAGTTAAAATAAG | ID NO: 1854 |
| | GCTAGTCCGTTATCAACTTGAAAAAG | |
| | TGGCACCGAGTCGGTGCTCGAAGGGG | |
| | CTGCGTACCACACCCGTCGCATTGGA | |
| | GAAGGG (SEQ ID NO: 1496) | |
| 1497 | GTGCCCTTCTCCAATGCGACGTTTTAG | pegRNA; contains gRNA core SEQ |
| | AGCTAGAAATAGCAAGTTAAAATAAG | ID NO: 1854 |
| | GCTAGTCCGTTATCAACTTGAAAAAG | |
| | TGGCACCGAGTCGGTGCTACTCGAAG | |
| | GGGCTGCGTACCACACCCGTCGCATT | |
| | GGAGAAG (SEQ ID NO: 1497) | |
| 1498 | GTGCCCTTCTCCAATGCGACGTTTTAG | pegRNA; contains gRNA core SEQ |
| | AGCTAGAAATAGCAAGTTAAAATAAG | ID NO: 1854, and TTTT (sequence |
| | GCTAGTCCGTTATCAACTTGAAAAAG | number 1860) 3′ terminal sequence |
| | TGGCACCGAGTCGGTGCGTACTCGAA | |
| | GGGGCTGCGTACCACACCCGTCGCAT | |
| | TGGATTTT (SEQ ID NO: 1498) | |
| 1499 | GTGCCCTTCTCCAATGCGACGTTTTAG | pegRNA; contains gRNA core SEQ |
| | AGCTAGAAATAGCAAGTTAAAATAAG | ID NO: 1854, and TTTT (sequence |
| | GCTAGTCCGTTATCAACTTGAAAAAG | number 1860) 3′ terminal sequence |
| | TGGCACCGAGTCGGTGCACTCGAAGG | |
| | GGCTGCGTACCACACCCGTCGCATTG | |
| | GAGATTTT (SEQ ID NO: 1499) | |
| 1500 | GTGCCCTTCTCCAATGCGACGTTTTAG | pegRNA; contains gRNA core SEQ |
| | AGCTAGAAATAGCAAGTTAAAATAAG | ID NO: 1854, and TTTT (sequence |
| | GCTAGTCCGTTATCAACTTGAAAAAG | number 1860) 3′ terminal sequence |
| | TGGCACCGAGTCGGTGCTCGAAGGGG | |
| | CTGCGTACCACACCCGTCGCATTGGA | |
| | GAAGTTTT (SEQ ID NO: 1500) | |
| 1501 | GTGCCCTTCTCCAATGCGACGTTTTAG | pegRNA; contains gRNA core SEQ |
| | AGCTAGAAATAGCAAGTTAAAATAAG | ID NO: 1854, and TTTT (sequence |
| | GCTAGTCCGTTATCAACTTGAAAAAG | number 1860) 3′ terminal sequence |
| | TGGCACCGAGTCGGTGCGAAGGGGCT | |
| | GCGTACCACACCCGTCGCATTGGAGA | |
| | AGGGTTTT (SEQ ID NO: 1501) | |
| 1502 | GTGCCCTTCTCCAATGCGACGTTTTAG | pegRNA; contains gRNA core SEQ |
| | AGCTAGAAATAGCAAGTTAAAATAAG | ID NO: 1854 |
| | GCTAGTCCGTTATCAACTTGAAAAAG | |
| | TGGCACCGAGTCGGTGCGTACTCGAA | |
| | GGGGCTGCGTACCACACCCGTCGCAT | |
| | TGGAGAAG (SEQ ID NO: 1502) | |
| 1503 | GTGCCCTTCTCCAATGCGACGTTTTAG | pegRNA; contains gRNA core SEQ |
| | AGCTAGAAATAGCAAGTTAAAATAAG | ID NO: 1854 |
| | GCTAGTCCGTTATCAACTTGAAAAAG | |
| | TGGCACCGAGTCGGTGCACTCGAAGG | |
| | GGCTGCGTACCACACCCGTCGCATTG | |
| | GAGAAGGG (SEQ ID NO: 1503) | |
| 1504 | GTGCCCTTCTCCAATGCGACGTTTTAG | pegRNA; contains gRNA core SEQ |
| | AGCTAGAAATAGCAAGTTAAAATAAG | ID NO: 1854 |
| | GCTAGTCCGTTATCAACTTGAAAAAG | |
| | TGGCACCGAGTCGGTGCTACTCGAAG | |
| | GGGCTGCGTACCACACCCGTCGCATT | |
| | GGAGAAGGG (SEQ ID NO: 1504) | |
| 1505 | GTGCCCTTCTCCAATGCGACGTTTTAG | pegRNA; contains gRNA core SEQ |
| | AGCTAGAAATAGCAAGTTAAAATAAG | ID NO: 1854, and TTTT (sequence |
| | GCTAGTCCGTTATCAACTTGAAAAAG | number 1860) 3′ terminal sequence |
| | TGGCACCGAGTCGGTGCGTACTCGAA | |
| | GGGGCTGCGTACCACACCCGTCGCAT | |
| | TGGAGATTTT (SEQ ID NO: 1505) | |
| 1506 | GTGCCCTTCTCCAATGCGACGTTTTAG | pegRNA; contains gRNA core SEQ |
| | AGCTAGAAATAGCAAGTTAAAATAAG | ID NO: 1854, and TTTT (sequence |
| | GCTAGTCCGTTATCAACTTGAAAAAG | number 1860) 3′ terminal sequence |
| | TGGCACCGAGTCGGTGCACTCGAAGG | |
| | GGCTGCGTACCACACCCGTCGCATTG | |
| | GAGAAGTTTT (SEQ ID NO: 1506) | |
| 1507 | GTGCCCTTCTCCAATGCGACGTTTTAG | pegRNA; contains gRNA core SEQ |
| | AGCTAGAAATAGCAAGTTAAAATAAG | ID NO: 1854, and TTTT (sequence |
| | GCTAGTCCGTTATCAACTTGAAAAAG | number 1860) 3′ terminal sequence |
| | TGGCACCGAGTCGGTGCTCGAAGGGG | |
| | CTGCGTACCACACCCGTCGCATTGGA | |
| | GAAGGGTTTT (SEQ ID NO: 1507) | |
| 1508 | GTGCCCTTCTCCAATGCGACGTTTTAG | pegRNA; contains gRNA core SEQ |
| | AGCTAGAAATAGCAAGTTAAAATAAG | ID NO: 1854 |
| | GCTAGTCCGTTATCAACTTGAAAAAG | |
| | TGGCACCGAGTCGGTGCGTACTCGAA | |
| | GGGGCTGCGTACCACACCCGTCGCAT | |
| | TGGAGAAGGG (SEQ ID NO: 1508) | |
| 1509 | GTGCCCTTCTCCAATGCGACGTTTTAG | pegRNA; contains gRNA core SEQ |
| | AGCTAGAAATAGCAAGTTAAAATAAG | ID NO: 1854, and TTTT (sequence |
| | GCTAGTCCGTTATCAACTTGAAAAAG | number 1860) 3′ terminal sequence |
| | TGGCACCGAGTCGGTGCGTACTCGAA | |
| | GGGGCTGCGTACCACACCCGTCGCAT | |
| | TGGAGAAGTTTT (SEQ ID NO: 1509) | |
| 1510 | GTGCCCTTCTCCAATGCGACGTTTTAG | pegRNA; contains gRNA core SEQ |
| | AGCTAGAAATAGCAAGTTAAAATAAG | ID NO: 1854, and TTTT (sequence |
| | GCTAGTCCGTTATCAACTTGAAAAAG | number 1860) 3′ terminal sequence |
| | TGGCACCGAGTCGGTGCACTCGAAGG | |
| | GGCTGCGTACCACACCCGTCGCATTG | |
| | GAGAAGGGTTTT (SEQ ID NO: 1510) | |
| 1511 | GTGCCCTTCTCCAATGCGACGTTTTAG | pegRNA; contains gRNA core SEQ |
| | AGCTAGAAATAGCAAGTTAAAATAAG | ID NO: 1854, and TTTT (sequence |
| | GCTAGTCCGTTATCAACTTGAAAAAG | number 1860) 3′ terminal sequence |
| | TGGCACCGAGTCGGTGCGTACTCGAA | |
| | GGGGCTGCGTACCACACCCGTCGCAT | |
| | TGGAGAAGGGTTTT (SEQ ID NO: 1511) | |
| 1512 | GTGCCCTTCTCCAATGCGACGTTTTAG | pegRNA; contains gRNA core SEQ |
| | AGCTAGAAATAGCAAGTTAAAATAAG | ID NO: 1854, and Linker |
| | GCTAGTCCGTTATCAACTTGAAAAAG | [AACATTGA (Sequence Number: |
| | TGGCACCGAGTCGGTGCTACTCGAAG | 1728)] + Univ. 3′ Motif |
| | GGGCTGCGTACCACACCCGTCGCATT | [CGCGTCTCTACGTGGGGGCGCG |
| | GGAAACATTGACGCGTCTCTACGTGG | (Sequence Number: 1850)] |
| | GGGCGCG (SEQ ID NO: 1512) | |
| 1513 | GTGCCCTTCTCCAATGCGACGTTTTAG | pegRNA; contains gRNA core SEQ |
| | AGCTAGAAATAGCAAGTTAAAATAAG | ID NO: 1854, and Linker |
| | GCTAGTCCGTTATCAACTTGAAAAAG | [AACATTGA (Sequence Number: |
| | TGGCACCGAGTCGGTGCTACTCGAAG | 1728)] + Univ. 3′ Motif |
| | GGGCTGCGTACCACACCCGTCGCATT | [CGCGTCTCTACGTGGGGGCGCG |
| | GGAGAAACATTGACGCGTCTCTACGT | (Sequence Number: 1850)] |
| | GGGGGCGCG (SEQ ID NO: 1513) | |
| 1514 | GTGCCCTTCTCCAATGCGACGTTTTAG | pegRNA; contains gRNA core SEQ |
| | AGCTAGAAATAGCAAGTTAAAATAAG | ID NO: 1854, and Linker |
| | GCTAGTCCGTTATCAACTTGAAAAAG | [AACATTGA (Sequence Number: |
| | TGGCACCGAGTCGGTGCTACTCGAAG | 1728)] + Univ. 3′ Motif |
| | GGGCTGCGTACCACACCCGTCGCATT | [CGCGTCTCTACGTGGGGGCGCG |
| | GGAGAAGAACATTGACGCGTCTCTAC | (Sequence Number: 1850)] |
| | GTGGGGGCGCG (SEQ ID NO: 1514) | |
| 1515 | GTGCCCTTCTCCAATGCGACGTTTTAG | pegRNA; contains gRNA core SEQ |
| | AGCTAGAAATAGCAAGTTAAAATAAG | ID NO: 1854, and Linker |
| | GCTAGTCCGTTATCAACTTGAAAAAG | [AACATTGA (Sequence Number: |
| | TGGCACCGAGTCGGTGCTACTCGAAG | 1728)] + Univ. 3′ Motif |
| | GGGCTGCGTACCACACCCGTCGCATT | [CGCGTCTCTACGTGGGGGCGCG |
| | GGAGAAGGGAACATTGACGCGTCTCT | (Sequence Number: 1850)] |
| | ACGTGGGGGCGCG (SEQ ID NO: 1515) | |
| 1161 | AGTACTGTGGGTACTCGAAGGTTTTA | PE3 ngRNA (TGG PAM); contains |
| | GAGCTAGAAATAGCAAGTTAAAATAA | gRNA core SEQ ID NO: 1854 |
| | GGCTAGTCCGTTATCAACTTGAAAAA | |
| | GTGGCACCGAGTCGGTGC (SEQ ID NO: | |
| | 1161) | |
| 1162 | GCTCAGCCAGGTAGTACTGTGTTTTAG | PE3 ngRNA (GGG PAM); contains |
| | AGCTAGAAATAGCAAGTTAAAATAAG | gRNA core SEQ ID NO: 1854 |
| | GCTAGTCCGTTATCAACTTGAAAAAG | |
| | TGGCACCGAGTCGGTGC (SEQ ID NO: | |
| | 1162) | |
| 1163 | GGCTCAGCCAGGTAGTACTGGTTTTA | PE3 ngRNA (TGG PAM); contains |
| | GAGCTAGAAATAGCAAGTTAAAATAA | gRNA core SEQ ID NO: 1854 |
| | GGCTAGTCCGTTATCAACTTGAAAAA | |
| | GTGGCACCGAGTCGGTGC (SEQ ID NO: | |
| | 1163) | |
| 1164 | AGAACTGCCATGGCTCAGCCGTTTTA | PE3 ngRNA (AGG PAM); contains |
| | GAGCTAGAAATAGCAAGTTAAAATAA | gRNA core SEQ ID NO: 1854 |
| | GGCTAGTCCGTTATCAACTTGAAAAA | |
| | GTGGCACCGAGTCGGTGC (SEQ ID NO: | |
| | 1164) | |
| 1165 | GCCAGCATGGAGAACTGCCAGTTTTA | PE3 ngRNA (TGG PAM); contains |
| | GAGCTAGAAATAGCAAGTTAAAATAA | gRNA core SEQ ID NO: 1854 |
| | GGCTAGTCCGTTATCAACTTGAAAAA | |
| | GTGGCACCGAGTCGGTGC (SEQ ID NO: | |
| | 1165) | |
| 1166 | AAACATGTAGGCGGCCAGCAGTTTTA | PE3 ngRNA (TGG PAM); contains |
| | GAGCTAGAAATAGCAAGTTAAAATAA | gRNA core SEQ ID NO: 1854 |
| | GGCTAGTCCGTTATCAACTTGAAAAA | |
| | GTGGCACCGAGTCGGTGC (SEQ ID NO: | |
| | 1166) | |
| 1167 | GATCAGCAGAAACATGTAGGGTTTTA | PE3 ngRNA (CGG PAM); contains |
| | GAGCTAGAAATAGCAAGTTAAAATAA | gRNA core SEQ ID NO: 1854 |
| | GGCTAGTCCGTTATCAACTTGAAAAA | |
| | GTGGCACCGAGTCGGTGC (SEQ ID NO: | |
| | 1167) | |
| 1168 | CACGATCAGCAGAAACATGTGTTTTA | PE3 ngRNA (AGG PAM); contains |
| | GAGCTAGAAATAGCAAGTTAAAATAA | gRNA core SEQ ID NO: 1854 |
| | GGCTAGTCCGTTATCAACTTGAAAAA | |
| | GTGGCACCGAGTCGGTGC (SEQ ID NO: | |
| | 1168) | |
| 1169 | AGAGCGTGAGGAAGTTGATGGTTTTA | PE3 ngRNA (GGG PAM); contains |
| | GAGCTAGAAATAGCAAGTTAAAATAA | gRNA core SEQ ID NO: 1854 |
| | GGCTAGTCCGTTATCAACTTGAAAAA | |
| | GTGGCACCGAGTCGGTGC (SEQ ID NO: | |
| | 1169) | |
| 1170 | GAGAACTGCCATGGCTCAGCCGTTTT | PE3 ngRNA (AGG PAM); contains |
| | AGAGCTAGAAATAGCAAGTTAAAATA | gRNA core SEQ ID NO: 1854 |
| | AGGCTAGTCCGTTATCAACTTGAAAA | |
| | AGTGGCACCGAGTCGGTGC (SEQ ID | |
| | NO: 1170) | |
| 1175 | AGTACTGTGGGTACTCGAAGGTTTTA | PE3 ngRNA (TGG PAM); contains |
| | GAGCTAGAAATAGCAAGTTAAAATAA | gRNA core SEQ ID NO: 1854, and |
| | GGCTAGTCCGTTATCAACTTGAAAAA | Linker [AACATTGA (Sequence |
| | GTGGCACCGAGTCGGTGCAACATTGA | Number: 1728)] + Univ. 3′ Motif |
| | CGCGTCTCTACGTGGGGGCGCG (SEQ | [CGCGTCTCTACGTGGGGGCGCG |
| | ID NO: 1175) | (Sequence Number: 1850)] |
| 1176 | GCTCAGCCAGGTAGTACTGTGTTTTAG | PE3 ngRNA (GGG PAM); contains |
| | AGCTAGAAATAGCAAGTTAAAATAAG | gRNA core SEQ ID NO: 1854, and |
| | GCTAGTCCGTTATCAACTTGAAAAAG | Linker [AACATTGA (Sequence |
| | TGGCACCGAGTCGGTGCAACATTGAC | Number: 1728)] + Univ. 3′ Motif |
| | GCGTCTCTACGTGGGGGCGCG (SEQ ID | [CGCGTCTCTACGTGGGGGCGCG |
| | NO: 1176) | (Sequence Number: 1850)] |
| 1177 | GGCTCAGCCAGGTAGTACTGGTTTTA | PE3 ngRNA (TGG PAM); contains |
| | GAGCTAGAAATAGCAAGTTAAAATAA | gRNA core SEQ ID NO: 1854, and |
| | GGCTAGTCCGTTATCAACTTGAAAAA | Linker [AACATTGA (Sequence |
| | GTGGCACCGAGTCGGTGCAACATTGA | Number: 1728)] + Univ. 3′ Motif |
| | CGCGTCTCTACGTGGGGGCGCG (SEQ | [CGCGTCTCTACGTGGGGGCGCG |
| | ID NO: 1177) | (Sequence Number: 1850)] |
| 1178 | AGAACTGCCATGGCTCAGCCGTTTTA | PE3 ngRNA (AGG PAM); contains |
| | GAGCTAGAAATAGCAAGTTAAAATAA | gRNA core SEQ ID NO: 1854, and |
| | GGCTAGTCCGTTATCAACTTGAAAAA | Linker [AACATTGA (Sequence |
| | GTGGCACCGAGTCGGTGCAACATTGA | Number: 1728)] + Univ. 3′ Motif |
| | CGCGTCTCTACGTGGGGGCGCG (SEQ | [CGCGTCTCTACGTGGGGGCGCG |
| | ID NO: 1178) | (Sequence Number: 1850)] |
| 1179 | GCCAGCATGGAGAACTGCCAGTTTTA | PE3 ngRNA (TGG PAM); contains |
| | GAGCTAGAAATAGCAAGTTAAAATAA | gRNA core SEQ ID NO: 1854, and |
| | GGCTAGTCCGTTATCAACTTGAAAAA | Linker [AACATTGA (Sequence |
| | GTGGCACCGAGTCGGTGCAACATTGA | Number: 1728)] + Univ. 3′ Motif |
| | CGCGTCTCTACGTGGGGGCGCG (SEQ | [CGCGTCTCTACGTGGGGGCGCG |
| | ID NO: 1179) | (Sequence Number: 1850)] |
| 1180 | AAACATGTAGGCGGCCAGCAGTTTTA | PE3 ngRNA (TGG PAM); contains |
| | GAGCTAGAAATAGCAAGTTAAAATAA | gRNA core SEQ ID NO: 1854, and |
| | GGCTAGTCCGTTATCAACTTGAAAAA | Linker [AACATTGA (Sequence |
| | GTGGCACCGAGTCGGTGCAACATTGA | Number: 1728)] + Univ. 3′ Motif |
| | CGCGTCTCTACGTGGGGGCGCG (SEQ | [CGCGTCTCTACGTGGGGGCGCG |
| | ID NO: 1180) | (Sequence Number: 1850)] |
| 1181 | GATCAGCAGAAACATGTAGGGTTTTA | PE3 ngRNA (CGG PAM); contains |
| | GAGCTAGAAATAGCAAGTTAAAATAA | gRNA core SEQ ID NO: 1854, and |
| | GGCTAGTCCGTTATCAACTTGAAAAA | Linker [AACATTGA (Sequence |
| | GTGGCACCGAGTCGGTGCAACATTGA | Number: 1728)] + Univ. 3′ Motif |
| | CGCGTCTCTACGTGGGGGCGCG (SEQ | [CGCGTCTCTACGTGGGGGCGCG |
| | ID NO: 1181) | (Sequence Number: 1850)] |
| 1182 | CACGATCAGCAGAAACATGTGTTTTA | PE3 ngRNA (AGG PAM); contains |
| | GAGCTAGAAATAGCAAGTTAAAATAA | gRNA core SEQ ID NO: 1854, and |
| | GGCTAGTCCGTTATCAACTTGAAAAA | Linker [AACATTGA (Sequence |
| | GTGGCACCGAGTCGGTGCAACATTGA | Number: 1728)] + Univ. 3′ Motif |
| | CGCGTCTCTACGTGGGGGCGCG (SEQ | [CGCGTCTCTACGTGGGGGCGCG |
| | ID NO: 1182) | (Sequence Number: 1850)] |
| 1183 | AGAGCGTGAGGAAGTTGATGGTTTTA | PE3 ngRNA (GGG PAM); contains |
| | GAGCTAGAAATAGCAAGTTAAAATAA | gRNA core SEQ ID NO: 1854, and |
| | GGCTAGTCCGTTATCAACTTGAAAAA | Linker [AACATTGA (Sequence |
| | GTGGCACCGAGTCGGTGCAACATTGA | Number: 1728)] + Univ. 3′ Motif |
| | CGCGTCTCTACGTGGGGGCGCG (SEQ | [CGCGTCTCTACGTGGGGGCGCG |
| | ID NO: 1183) | (Sequence Number: 1850)] |
| 1184 | GGCTCAGCCAGGTAGTACTGGTTTTA | PE3 ngRNA (TGG PAM); contains |
| | GAGCTAGAAATAGCAAGTTAAAATAA | gRNA core SEQ ID NO: 1854, Linker |
| | GGCTAGTCCGTTATCAACTTGAAAAA | [AACATTGA (Sequence Number: |
| | GTGGCACCGAGTCGGTGCAACATTGA | 1728)] + Univ. 3′ Motif |
| | CGCGTCTCTACGTGGGGGCGCGTTTTT | [CGCGTCTCTACGTGGGGGCGCG |
| | TT (SEQ ID NO: 1184) | (Sequence Number: 1850)], and |
| | | transcription adaptations |
| 1186 | GAGAACTGCCATGGCTCAGCCGTTTT | PE3 ngRNA (AGG PAM); contains |
| | AGAGCTAGAAATAGCAAGTTAAAATA | gRNA core SEQ ID NO: 1854, Linker |
| | AGGCTAGTCCGTTATCAACTTGAAAA | [AACATTGA (Sequence Number: |
| | AGTGGCACCGAGTCGGTGCAACATTG | 1728)] + Univ. 3′ Motif |
| | ACGCGTCTCTACGTGGGGGCGCGTTTT | [CGCGTCTCTACGTGGGGGCGCG |
| | TTT (SEQ ID NO: 1186) | (Sequence Number: 1850)], and |
| | | transcription adaptations |

TABLE 7

| Sequence | | |
|---|---|---|
| Number | Sequence | Description |
| 1516 | ACTGCCATGGCTCAGCC (SEQ ID NO: | PERNA spacer (AGG PAM) |
| | 1516) | |
| 1517 | AACTGCCATGGCTCAGCC (SEQ ID NO: | PEgRNA spacer (AGG PAM) |
| | 1517) | |
| 1518 | GAACTGCCATGGCTCAGCC (SEQ ID | PEgRNA spacer (AGG PAM) |
| | NO: 1518) | |
| 850 | AGAACTGCCATGGCTCAGCC (SEQ ID | PEgRNA spacer (AGG PAM) |
| | NO: 850) | |
| 1519 | GAGAACTGCCATGGCTCAGCC (SEQ ID | PEgRNA spacer (AGG PAM) |
| | NO: 1519) | |
| 1520 | GGAGAACTGCCATGGCTCAGCC (SEQ | PEgRNA spacer (AGG PAM) |
| | ID NO: 1520) | |
| 1521 | TGAGC | PBS |
| 1522 | TGAGCC | PBS |
| 1523 | TGAGCCA | PBS |
| 1524 | TGAGCCAT | PBS |
| 1525 | TGAGCCATG | PBS |
| 1526 | TGAGCCATGG (SEQ ID NO: 1526) | PBS |
| 1527 | TGAGCCATGGC (SEQ ID NO: 1527) | PBS |
| 1528 | TGAGCCATGGCA (SEQ ID NO: 1528) | PBS |
| 1529 | TGAGCCATGGCAG (SEQ ID NO: 1529) | PBS |
| 1530 | TGAGCCATGGCAGT (SEQ ID NO: 1530) | PBS |
| 1531 | TGAGCCATGGCAGTT (SEQ ID NO: | PBS |
| | 1531) | |
| 1532 | TGAGCCATGGCAGTTC (SEQ ID NO: | PBS |
| | 1532) | |
| 1533 | TGAGCCATGGCAGTTCT (SEQ ID NO: | PBS |
| | 1533) | |
| 1534 | TGAGCCATGGCAGTTCTC (SEQ ID NO: | PBS |
| | 1534) | |
| 1535 | TGAGCCATGGCAGTTCTCC (SEQ ID | PBS |
| | NO: 1535) | |
| 1536 | CCTTCGAGTACCCACAGTACTACCTG | RTT |
| | GC (SEQ ID NO: 1536) | |
| 1537 | CCTTCGAGTACCCACAGTACTACTTAG | RTT (AGG-to-AAG PAM silencing |
| | C (SEQ ID NO: 1537) | edit) |
| 1538 | CCTTCGAGTACCCACAGTACTACTTGG | RTT*1 (AGG-to-AAG PAM |
| | C (SEQ ID NO: 1538) | silencing edit) |
| 1539 | CCTTCGAGTACCCACAGTACTATCTGG | RTT*2 (AGG-to-AGA PAM |
| | C (SEQ ID NO: 1539) | silencing edit) |
| 1540 | CCTTCGAGTACCCACAGTACTATTTAG | RTT (AGG-to-AAA PAM silencing |
| | C (SEQ ID NO: 1540) | edit) |
| 1541 | CCTTCGAGTACCCACAGTACTATTTGG | RTT*3 (AGG-to-AAA PAM |
| | C (SEQ ID NO: 1541) | silencing edit) |
| 1542 | CCCTTCGAGTACCCACAGTACTACCTG | RTT |
| | GC (SEQ ID NO: 1542) | |
| 1543 | CCCTTCGAGTACCCACAGTACTACTTA | RTT (AGG-to-AAG PAM silencing |
| | GC (SEQ ID NO: 1543) | edit) |
| 1544 | CCCTTCGAGTACCCACAGTACTACTTG | RTT*1 (AGG-to-AAG PAM |
| | GC (SEQ ID NO: 1544) | silencing edit) |
| 1545 | CCCTTCGAGTACCCACAGTACTATCTG | RTT*2 (AGG-to-AGA PAM |
| | GC (SEQ ID NO: 1545) | silencing edit) |
| 1546 | CCCTTCGAGTACCCACAGTACTATTTA | RTT (AGG-to-AAA PAM silencing |
| | GC (SEQ ID NO: 1546) | edit) |
| 1547 | CCCTTCGAGTACCCACAGTACTATTTG | RTT*3 (AGG-to-AAA PAM |
| | GC (SEQ ID NO: 1547) | silencing edit) |
| 1548 | CCCCTTCGAGTACCCACAGTACTACCT | RTT |
| | GGC (SEQ ID NO: 1548) | |
| 1549 | CCCCTTCGAGTACCCACAGTACTACTT | RTT (AGG-to-AAG PAM silencing |
| | AGC (SEQ ID NO: 1549) | edit) |
| 1550 | CCCCTTCGAGTACCCACAGTACTACTT | RTT*1 (AGG-to-AAG PAM |
| | GGC (SEQ ID NO: 1550) | silencing edit) |
| 1551 | CCCCTTCGAGTACCCACAGTACTATCT | RTT*2 (AGG-to-AGA PAM |
| | GGC (SEQ ID NO: 1551) | silencing edit) |
| 1552 | CCCCTTCGAGTACCCACAGTACTATTT | RTT (AGG-to-AAA PAM silencing |
| | AGC (SEQ ID NO: 1552) | edit) |
| 1553 | CCCCTTCGAGTACCCACAGTACTATTT | RTT*3 (AGG-to-AAA PAM |
| | GGC (SEQ ID NO: 1553) | silencing edit) |
| 1554 | GCCCCTTCGAGTACCCACAGTACTAC | RTT |
| | CTGGC (SEQ ID NO: 1554) | |
| 1555 | GCCCCTTCGAGTACCCACAGTACTACT | RTT (AGG-to-AAG PAM silencing |
| | TAGC (SEQ ID NO: 1555) | edit) |
| 1556 | GCCCCTTCGAGTACCCACAGTACTACT | RTT*1 (AGG-to-AAG PAM |
| | TGGC (SEQ ID NO: 1556) | silencing edit) |
| 1557 | GCCCCTTCGAGTACCCACAGTACTATC | RTT*2 (AGG-to-AGA PAM |
| | TGGC (SEQ ID NO: 1557) | silencing edit) |
| 1558 | GCCCCTTCGAGTACCCACAGTACTATT | RTT (AGG-to-AAA PAM silencing |
| | TAGC (SEQ ID NO: 1558) | edit) |
| 1559 | GCCCCTTCGAGTACCCACAGTACTATT | RTT*3 (AGG-to-AAA PAM |
| | TGGC (SEQ ID NO: 1559) | silencing edit) |
| 1560 | AGCCCCTTCGAGTACCCACAGTACTA | RTT |
| | CCTGGC (SEQ ID NO: 1560) | |
| 1561 | AGCCCCTTCGAGTACCCACAGTACTA | RTT (AGG-to-AAG PAM silencing |
| | CTTAGC (SEQ ID NO: 1561) | edit) |
| 1562 | AGCCCCTTCGAGTACCCACAGTACTA | RTT*1 (AGG-to-AAG PAM |
| | CTTGGC (SEQ ID NO: 1562) | silencing edit) |
| 1563 | AGCCCCTTCGAGTACCCACAGTACTA | RTT*2 (AGG-to-AGA PAM |
| | TCTGGC (SEQ ID NO: 1563) | silencing edit) |
| 1564 | AGCCCCTTCGAGTACCCACAGTACTA | RTT (AGG-to-AAA PAM silencing |
| | TTTAGC (SEQ ID NO: 1564) | edit) |
| 1565 | AGCCCCTTCGAGTACCCACAGTACTA | RTT*3 (AGG-to-AAA PAM |
| | TTTGGC (SEQ ID NO: 1565) | silencing edit) |
| 1566 | CAGCCCCTTCGAGTACCCACAGTACT | RTT |
| | ACCTGGC (SEQ ID NO: 1566) | |
| 1567 | CAGCCCCTTCGAGTACCCACAGTACT | RTT (AGG-to-AAG PAM silencing |
| | ACTTAGC (SEQ ID NO: 1567) | edit) |
| 1568 | CAGCCCCTTCGAGTACCCACAGTACT | RTT*1 (AGG-to-AAG PAM |
| | ACTTGGC (SEQ ID NO: 1568) | silencing edit) |
| 1569 | CAGCCCCTTCGAGTACCCACAGTACT | RTT*2 (AGG-to-AGA PAM |
| | ATCTGGC (SEQ ID NO: 1569) | silencing edit) |
| 1570 | CAGCCCCTTCGAGTACCCACAGTACT | RTT (AGG-to-AAA PAM silencing |
| | ATTTAGC (SEQ ID NO: 1570) | edit) |
| 1571 | CAGCCCCTTCGAGTACCCACAGTACT | RTT*3 (AGG-to-AAA PAM |
| | ATTTGGC (SEQ ID NO: 1571) | silencing edit) |
| 1572 | GCAGCCCCTTCGAGTACCCACAGTAC | RTT |
| | TACCTGGC (SEQ ID NO: 1572) | |
| 1573 | GCAGCCCCTTCGAGTACCCACAGTAC | RTT (AGG-to-AAG PAM silencing |
| | TACTTAGC (SEQ ID NO: 1573) | edit) |
| 1574 | GCAGCCCCTTCGAGTACCCACAGTAC | RTT*1 (AGG-to-AAG PAM |
| | TACTTGGC (SEQ ID NO: 1574) | silencing edit) |
| 1575 | GCAGCCCCTTCGAGTACCCACAGTAC | RTT*2 (AGG-to-AGA PAM |
| | TATCTGGC (SEQ ID NO: 1575) | silencing edit) |
| 1576 | GCAGCCCCTTCGAGTACCCACAGTAC | RTT (AGG-to-AAA PAM silencing |
| | TATTTAGC (SEQ ID NO: 1576) | edit) |
| 1577 | GCAGCCCCTTCGAGTACCCACAGTAC | RTT*3 (AGG-to-AAA PAM |
| | TATTTGGC (SEQ ID NO: 1577) | silencing edit) |
| 1578 | CGCAGCCCCTTCGAGTACCCACAGTA | RTT |
| | CTACCTGGC (SEQ ID NO: 1578) | |
| 1579 | CGCAGCCCCTTCGAGTACCCACAGTA | RTT (AGG-to-AAG PAM silencing |
| | CTACTTAGC (SEQ ID NO: 1579) | edit) |
| 1580 | CGCAGCCCCTTCGAGTACCCACAGTA | RTT*1 (AGG-to-AAG PAM |
| | CTACTTGGC (SEQ ID NO: 1580) | silencing edit) |
| 1581 | CGCAGCCCCTTCGAGTACCCACAGTA | RTT*2 (AGG-to-AGA PAM |
| | CTATCTGGC (SEQ ID NO: 1581) | silencing edit) |
| 1582 | CGCAGCCCCTTCGAGTACCCACAGTA | RTT (AGG-to-AAA PAM silencing |
| | CTATTTAGC (SEQ ID NO: 1582) | edit) |
| 1583 | CGCAGCCCCTTCGAGTACCCACAGTA | RTT*3 (AGG-to-AAA PAM |
| | CTATTTGGC (SEQ ID NO: 1583) | silencing edit) |
| 1584 | ACGCAGCCCCTTCGAGTACCCACAGT | RTT |
| | ACTACCTGGC (SEQ ID NO: 1584) | |
| 1585 | ACGCAGCCCCTTCGAGTACCCACAGT | RTT (AGG-to-AAG PAM silencing |
| | ACTACTTAGC (SEQ ID NO: 1585) | edit) |
| 1586 | ACGCAGCCCCTTCGAGTACCCACAGT | RTT*1 (AGG-to-AAG PAM |
| | ACTACTTGGC (SEQ ID NO: 1586) | silencing edit) |
| 1587 | ACGCAGCCCCTTCGAGTACCCACAGT | RTT*2 (AGG-to-AGA PAM |
| | ACTATCTGGC (SEQ ID NO: 1587) | silencing edit) |
| 1588 | ACGCAGCCCCTTCGAGTACCCACAGT | RTT (AGG-to-AAA PAM silencing |
| | ACTATTTAGC (SEQ ID NO: 1588) | edit) |
| 1589 | ACGCAGCCCCTTCGAGTACCCACAGT | RTT*3 (AGG-to-AAA PAM |
| | ACTATTTGGC (SEQ ID NO: 1589) | silencing edit) |
| 1590 | TACGCAGCCCCTTCGAGTACCCACAG | RTT |
| | TACTACCTGGC (SEQ ID NO: 1590) | |
| 1591 | TACGCAGCCCCTTCGAGTACCCACAG | RTT (AGG-to-AAG PAM silencing |
| | TACTACTTAGC (SEQ ID NO: 1591) | edit) |
| 1592 | TACGCAGCCCCTTCGAGTACCCACAG | RTT*1 (AGG-to-AAG PAM |
| | TACTACTTGGC (SEQ ID NO: 1592) | silencing edit) |
| 1593 | TACGCAGCCCCTTCGAGTACCCACAG | RTT*2 (AGG-to-AGA PAM |
| | TACTATCTGGC (SEQ ID NO: 1593) | silencing edit) |
| 1594 | TACGCAGCCCCTTCGAGTACCCACAG | RTT (AGG-to-AAA PAM silencing |
| | TACTATTTAGC (SEQ ID NO: 1594) | edit) |
| 1595 | TACGCAGCCCCTTCGAGTACCCACAG | RTT*3 (AGG-to-AAA PAM |
| | TACTATTTGGC (SEQ ID NO: 1595) | silencing edit) |
| 1596 | GTACGCAGCCCCTTCGAGTACCCACA | RTT |
| | GTACTACCTGGC (SEQ ID NO: 1596) | |
| 1597 | GTACGCAGCCCCTTCGAGTACCCACA | RTT (AGG-to-AAG PAM silencing |
| | GTACTACTTAGC (SEQ ID NO: 1597) | edit) |
| 1598 | GTACGCAGCCCCTTCGAGTACCCACA | RTT*1 (AGG-to-AAG PAM |
| | GTACTACTTGGC (SEQ ID NO: 1598) | silencing edit) |
| 1599 | GTACGCAGCCCCTTCGAGTACCCACA | RTT*2 (AGG-to-AGA PAM |
| | GTACTATCTGGC (SEQ ID NO: 1599) | silencing edit) |
| 1600 | GTACGCAGCCCCTTCGAGTACCCACA | RTT (AGG-to-AAA PAM silencing |
| | GTACTATTTAGC (SEQ ID NO: 1600) | edit) |
| 1601 | GTACGCAGCCCCTTCGAGTACCCACA | RTT*3 (AGG-to-AAA PAM |
| | GTACTATTTGGC (SEQ ID NO: 1601) | silencing edit) |
| 1602 | GGTACGCAGCCCCTTCGAGTACCCAC | RTT |
| | AGTACTACCTGGC (SEQ ID NO: 1602) | |
| 1603 | GGTACGCAGCCCCTTCGAGTACCCAC | RTT (AGG-to-AAG PAM silencing |
| | AGTACTACTTAGC (SEQ ID NO: 1603) | edit) |
| 1604 | GGTACGCAGCCCCTTCGAGTACCCAC | RTT*1 (AGG-to-AAG PAM |
| | AGTACTACTTGGC (SEQ ID NO: 1604) | silencing edit) |
| 1605 | GGTACGCAGCCCCTTCGAGTACCCAC | RTT*2 (AGG-to-AGA PAM |
| | AGTACTATCTGGC (SEQ ID NO: 1605) | silencing edit) |
| 1606 | GGTACGCAGCCCCTTCGAGTACCCAC | RTT (AGG-to-AAA PAM silencing |
| | AGTACTATTTAGC (SEQ ID NO: 1606) | edit) |
| 1607 | GGTACGCAGCCCCTTCGAGTACCCAC | RTT*3 (AGG-to-AAA PAM |
| | AGTACTATTTGGC (SEQ ID NO: 1607) | silencing edit) |
| 1608 | TGGTACGCAGCCCCTTCGAGTACCCA | RTT |
| | CAGTACTACCTGGC (SEQ ID NO: 1608) | |
| 1609 | TGGTACGCAGCCCCTTCGAGTACCCA | RTT (AGG-to-AAG PAM silencing |
| | CAGTACTACTTAGC (SEQ ID NO: 1609) | edit) |
| 1610 | TGGTACGCAGCCCCTTCGAGTACCCA | RTT*1 (AGG-to-AAG PAM |
| | CAGTACTACTTGGC (SEQ ID NO: 1610) | silencing edit) |
| 1611 | TGGTACGCAGCCCCTTCGAGTACCCA | RTT*2 (AGG-to-AGA PAM |
| | CAGTACTATCTGGC (SEQ ID NO: 1611) | silencing edit) |
| 1612 | TGGTACGCAGCCCCTTCGAGTACCCA | RTT (AGG-to-AAA PAM silencing |
| | CAGTACTATTTAGC (SEQ ID NO: 1612) | edit) |
| 1613 | TGGTACGCAGCCCCTTCGAGTACCCA | RTT*3 (AGG-to-AAA PAM |
| | CAGTACTATTTGGC (SEQ ID NO: 1613) | silencing edit) |
| 72 | ACAAGGGCCACAGCCATGAA (SEQ ID | PE3 ngRNA spacer (TGG PAM) |
| | NO: 72) | |
| 73 | ACAGCCATGAATGGCACAGA (SEQ ID | PE3 ngRNA spacer (AGG PAM) |
| | NO: 73) | |
| 74 | CAGCCACGGGTCAGCCACAA (SEQ ID | PE3 ngRNA spacer (GGG PAM) |
| | NO: 74) | |
| 82 | CGAGTACCCACAGTACTACC (SEQ ID | PE3 ngRNA spacer (TGG PAM) |
| | NO: 82) | |
| 1614 | CGAGTACCCACAGTACTACT (SEQ ID | PE3b*1 ngRNA spacer (TGG PAM) |
| | NO: 1614) | |
| 1615 | CGAGTACCCACAGTACTATC (SEQ ID | PE3b*2 ngRNA spacer (TGG PAM) |
| | NO: 1615) | |
| 1616 | CGAGTACCCACAGTACTATT (SEQ ID | PE3b*3 ngRNA spacer (TGG PAM) |
| | NO: 1616) | |
| 75 | CGTGCCCTTCTCCAATGCGA (SEQ ID | PE3 ngRNA spacer (CGG PAM) |
| | NO: 75) | |
| 76 | CTTCTCCAATGCGACGGGTG (SEQ ID | PE3 ngRNA spacer (TGG PAM) |
| | NO: 76) | |
| 77 | GCAGCCACGGGTCAGCCACA (SEQ ID | PE3 ngRNA spacer (AGG PAM) |
| | NO: 77) | |
| 78 | GTGCCCTTCTCCAATGCGAC (SEQ ID | PE3 ngRNA spacer (GGG PAM) |
| | NO: 78) | |
| 1617 | AGAACTGCCATGGCTCAGCCGTTTTA | pegRNA; contains gRNA core SEQ |
| | GAGCTAGAAATAGCAAGTTAAAATAA | ID NO: 1854 |
| | GGCTAGTCCGTTATCAACTTGAAAAA | |
| | GTGGCACCGAGTCGGTGCAGCCCCTT | |
| | CGAGTACCCACAGTACTACCTGGCTG | |
| | AGCCAT (SEQ ID NO: 1617) | |
| 1618 | AGAACTGCCATGGCTCAGCCGTTTTA | pegRNA; contains gRNA core SEQ |
| | GAGCTAGAAATAGCAAGTTAAAATAA | ID NO: 1854 |
| | GGCTAGTCCGTTATCAACTTGAAAAA | |
| | GTGGCACCGAGTCGGTGCGCAGCCCC | |
| | TTCGAGTACCCACAGTACTACCTGGCT | |
| | GAGCCAT (SEQ ID NO: 1618) | |
| 1619 | AGAACTGCCATGGCTCAGCCGTTTTA | pegRNA; contains gRNA core SEQ |
| | GAGCTAGAAATAGCAAGTTAAAATAA | ID NO: 1854 |
| | GGCTAGTCCGTTATCAACTTGAAAAA | |
| | GTGGCACCGAGTCGGTGCAGCCCCTT | |
| | CGAGTACCCACAGTACTACCTGGCTG | |
| | AGCCATGG (SEQ ID NO: 1619) | |
| 1620 | AGAACTGCCATGGCTCAGCCGTTTTA | pegRNA; contains gRNA core SEQ |
| | GAGCTAGAAATAGCAAGTTAAAATAA | ID NO: 1854, and TTTT (sequence |
| | GGCTAGTCCGTTATCAACTTGAAAAA | number 1860) 3′ terminal sequence |
| | GTGGCACCGAGTCGGTGCAGCCCCTT | |
| | CGAGTACCCACAGTACTACCTGGCTG | |
| | AGCCATTTTT (SEQ ID NO: 1620) | |
| 1621 | AGAACTGCCATGGCTCAGCCGTTTTA | pegRNA; contains gRNA core SEQ |
| | GAGCTAGAAATAGCAAGTTAAAATAA | ID NO: 1854 |
| | GGCTAGTCCGTTATCAACTTGAAAAA | |
| | GTGGCACCGAGTCGGTGCACGCAGCC | |
| | CCTTCGAGTACCCACAGTACTACCTG | |
| | GCTGAGCCAT (SEQ ID NO: 1621) | |
| 1622 | AGAACTGCCATGGCTCAGCCGTTTTA | pegRNA; contains gRNA core SEQ |
| | GAGCTAGAAATAGCAAGTTAAAATAA | ID NO: 1854 |
| | GGCTAGTCCGTTATCAACTTGAAAAA | |
| | GTGGCACCGAGTCGGTGCGCAGCCCC | |
| | TTCGAGTACCCACAGTACTACCTGGCT | |
| | GAGCCATGG (SEQ ID NO: 1622) | |
| 1623 | AGAACTGCCATGGCTCAGCCGTTTTA | pegRNA; contains gRNA core SEQ |
| | GAGCTAGAAATAGCAAGTTAAAATAA | ID NO: 1854 |
| | GGCTAGTCCGTTATCAACTTGAAAAA | |
| | GTGGCACCGAGTCGGTGCAGCCCCTT | |
| | CGAGTACCCACAGTACTACCTGGCTG | |
| | AGCCATGGCA (SEQ ID NO: 1623) | |
| 1624 | AGAACTGCCATGGCTCAGCCGTTTTA | pegRNA; contains gRNA core SEQ |
| | GAGCTAGAAATAGCAAGTTAAAATAA | ID NO: 1854, and TTTT (sequence |
| | GGCTAGTCCGTTATCAACTTGAAAAA | number 1860) 3′ terminal sequence |
| | GTGGCACCGAGTCGGTGCGCAGCCCC | |
| | TTCGAGTACCCACAGTACTACCTGGCT | |
| | GAGCCATTTTT (SEQ ID NO: 1624) | |
| 1625 | AGAACTGCCATGGCTCAGCCGTTTTA | pegRNA; contains gRNA core SEQ |
| | GAGCTAGAAATAGCAAGTTAAAATAA | ID NO: 1854, and TTTT (sequence |
| | GGCTAGTCCGTTATCAACTTGAAAAA | number 1860) 3′ terminal sequence |
| | GTGGCACCGAGTCGGTGCAGCCCCTT | |
| | CGAGTACCCACAGTACTACCTGGCTG | |
| | AGCCATGGTTTT (SEQ ID NO: 1625) | |
| 1626 | AGAACTGCCATGGCTCAGCCGTTTTA | pegRNA; contains gRNA core SEQ |
| | GAGCTAGAAATAGCAAGTTAAAATAA | ID NO: 1854 |
| | GGCTAGTCCGTTATCAACTTGAAAAA | |
| | GTGGCACCGAGTCGGTGCGTACGCAG | |
| | CCCCTTCGAGTACCCACAGTACTACCT | |
| | GGCTGAGCCAT (SEQ ID NO: 1626) | |
| 1627 | AGAACTGCCATGGCTCAGCCGTTTTA | pegRNA; contains gRNA core SEQ |
| | GAGCTAGAAATAGCAAGTTAAAATAA | ID NO: 1854 |
| | GGCTAGTCCGTTATCAACTTGAAAAA | |
| | GTGGCACCGAGTCGGTGCACGCAGCC | |
| | CCTTCGAGTACCCACAGTACTACCTG | |
| | GCTGAGCCATGG (SEQ ID NO: 1627) | |
| 1628 | AGAACTGCCATGGCTCAGCCGTTTTA | pegRNA; contains gRNA core SEQ |
| | GAGCTAGAAATAGCAAGTTAAAATAA | ID NO: 1854 |
| | GGCTAGTCCGTTATCAACTTGAAAAA | |
| | GTGGCACCGAGTCGGTGCGCAGCCCC | |
| | TTCGAGTACCCACAGTACTACCTGGCT | |
| | GAGCCATGGCA (SEQ ID NO: 1628) | |
| 1629 | AGAACTGCCATGGCTCAGCCGTTTTA | pegRNA; contains gRNA core SEQ |
| | GAGCTAGAAATAGCAAGTTAAAATAA | ID NO: 1854 |
| | GGCTAGTCCGTTATCAACTTGAAAAA | |
| | GTGGCACCGAGTCGGTGCAGCCCCTT | |
| | CGAGTACCCACAGTACTACCTGGCTG | |
| | AGCCATGGCAGT (SEQ ID NO: 1629) | |
| 1630 | AGAACTGCCATGGCTCAGCCGTTTTA | pegRNA; contains gRNA core SEQ |
| | GAGCTAGAAATAGCAAGTTAAAATAA | ID NO: 1854, and TTTT (sequence |
| | GGCTAGTCCGTTATCAACTTGAAAAA | number 1860) 3′ terminal sequence |
| | GTGGCACCGAGTCGGTGCACGCAGCC | |
| | CCTTCGAGTACCCACAGTACTACCTG | |
| | GCTGAGCCATTTTT (SEQ ID NO: 1630) | |
| 1631 | AGAACTGCCATGGCTCAGCCGTTTTA | pegRNA; contains gRNA core SEQ |
| | GAGCTAGAAATAGCAAGTTAAAATAA | ID NO: 1854, and TTTT (sequence |
| | GGCTAGTCCGTTATCAACTTGAAAAA | number 1860) 3′ terminal sequence |
| | GTGGCACCGAGTCGGTGCGCAGCCCC | |
| | TTCGAGTACCCACAGTACTACCTGGCT | |
| | GAGCCATGGTTTT (SEQ ID NO: 1631) | |
| 1632 | AGAACTGCCATGGCTCAGCCGTTTTA | pegRNA; contains gRNA core SEQ |
| | GAGCTAGAAATAGCAAGTTAAAATAA | ID NO: 1854, and TTTT (sequence |
| | GGCTAGTCCGTTATCAACTTGAAAAA | number 1860) 3′ terminal sequence |
| | GTGGCACCGAGTCGGTGCAGCCCCTT | |
| | CGAGTACCCACAGTACTACCTGGCTG | |
| | AGCCATGGCATTTT (SEQ ID NO: 1632) | |
| 1633 | AGAACTGCCATGGCTCAGCCGTTTTA | pegRNA; contains gRNA core SEQ |
| | GAGCTAGAAATAGCAAGTTAAAATAA | ID NO: 1854 |
| | GGCTAGTCCGTTATCAACTTGAAAAA | |
| | GTGGCACCGAGTCGGTGCGTACGCAG | |
| | CCCCTTCGAGTACCCACAGTACTACCT | |
| | GGCTGAGCCATGG (SEQ ID NO: 1633) | |
| 1634 | AGAACTGCCATGGCTCAGCCGTTTTA | pegRNA; contains gRNA core SEQ |
| | GAGCTAGAAATAGCAAGTTAAAATAA | ID NO: 1854 |
| | GGCTAGTCCGTTATCAACTTGAAAAA | |
| | GTGGCACCGAGTCGGTGCACGCAGCC | |
| | CCTTCGAGTACCCACAGTACTACCTG | |
| | GCTGAGCCATGGCA (SEQ ID NO: 1634) | |
| 1635 | AGAACTGCCATGGCTCAGCCGTTTTA | pegRNA; contains gRNA core SEQ |
| | GAGCTAGAAATAGCAAGTTAAAATAA | ID NO: 1854 |
| | GGCTAGTCCGTTATCAACTTGAAAAA | |
| | GTGGCACCGAGTCGGTGCGCAGCCCC | |
| | TTCGAGTACCCACAGTACTACCTGGCT | |
| | GAGCCATGGCAGT (SEQ ID NO: 1635) | |
| 1636 | AGAACTGCCATGGCTCAGCCGTTTTA | pegRNA; contains gRNA core SEQ |
| | GAGCTAGAAATAGCAAGTTAAAATAA | ID NO: 1854, and TTTT (sequence |
| | GGCTAGTCCGTTATCAACTTGAAAAA | number 1860) 3′ terminal sequence |
| | GTGGCACCGAGTCGGTGCGTACGCAG | |
| | CCCCTTCGAGTACCCACAGTACTACCT | |
| | GGCTGAGCCATTTTT (SEQ ID NO: | |
| | 1636) | |
| 1637 | AGAACTGCCATGGCTCAGCCGTTTTA | pegRNA; contains gRNA core SEQ |
| | GAGCTAGAAATAGCAAGTTAAAATAA | ID NO: 1854, and TTTT (sequence |
| | GGCTAGTCCGTTATCAACTTGAAAAA | number 1860) 3′ terminal sequence |
| | GTGGCACCGAGTCGGTGCACGCAGCC | |
| | CCTTCGAGTACCCACAGTACTACCTG | |
| | GCTGAGCCATGGTTTT (SEQ ID NO: | |
| | 1637) | |
| 1638 | AGAACTGCCATGGCTCAGCCGTTTTA | pegRNA; contains gRNA core SEQ |
| | GAGCTAGAAATAGCAAGTTAAAATAA | ID NO: 1854, and TTTT (sequence |
| | GGCTAGTCCGTTATCAACTTGAAAAA | number 1860) 3′ terminal sequence |
| | GTGGCACCGAGTCGGTGCGCAGCCCC | |
| | TTCGAGTACCCACAGTACTACCTGGCT | |
| | GAGCCATGGCATTTT (SEQ ID NO: | |
| | 1638) | |
| 1639 | AGAACTGCCATGGCTCAGCCGTTTTA | pegRNA; contains gRNA core SEQ |
| | GAGCTAGAAATAGCAAGTTAAAATAA | ID NO: 1854, and TTTT (sequence |
| | GGCTAGTCCGTTATCAACTTGAAAAA | number 1860) 3′ terminal sequence |
| | GTGGCACCGAGTCGGTGCAGCCCCTT | |
| | CGAGTACCCACAGTACTACCTGGCTG | |
| | AGCCATGGCAGTTTTT (SEQ ID NO: | |
| | 1639) | |
| 1640 | AGAACTGCCATGGCTCAGCCGTTTTA | pegRNA; contains gRNA core SEQ |
| | GAGCTAGAAATAGCAAGTTAAAATAA | ID NO: 1854 |
| | GGCTAGTCCGTTATCAACTTGAAAAA | |
| | GTGGCACCGAGTCGGTGCGTACGCAG | |
| | CCCCTTCGAGTACCCACAGTACTACCT | |
| | GGCTGAGCCATGGCA (SEQ ID NO: | |
| | 1640) | |
| 1641 | AGAACTGCCATGGCTCAGCCGTTTTA | pegRNA; contains gRNA core SEQ |
| | GAGCTAGAAATAGCAAGTTAAAATAA | ID NO: 1854 |
| | GGCTAGTCCGTTATCAACTTGAAAAA | |
| | GTGGCACCGAGTCGGTGCACGCAGCC | |
| | CCTTCGAGTACCCACAGTACTACCTG | |
| | GCTGAGCCATGGCAGT (SEQ ID NO: | |
| | 1641) | |
| 1642 | AGAACTGCCATGGCTCAGCCGTTTTA | pegRNA; contains gRNA core SEQ |
| | GAGCTAGAAATAGCAAGTTAAAATAA | ID NO: 1854, and TTTT (sequence |
| | GGCTAGTCCGTTATCAACTTGAAAAA | number 1860) 3′ terminal sequence |
| | GTGGCACCGAGTCGGTGCGTACGCAG | |
| | CCCCTTCGAGTACCCACAGTACTACCT | |
| | GGCTGAGCCATGGTTTT (SEQ ID NO: | |
| | 1642) | |
| 1643 | AGAACTGCCATGGCTCAGCCGTTTTA | pegRNA; contains gRNA core SEQ |
| | GAGCTAGAAATAGCAAGTTAAAATAA | ID NO: 1854, and TTTT (sequence |
| | GGCTAGTCCGTTATCAACTTGAAAAA | number 1860) 3′ terminal sequence |
| | GTGGCACCGAGTCGGTGCACGCAGCC | |
| | CCTTCGAGTACCCACAGTACTACCTG | |
| | GCTGAGCCATGGCATTTT (SEQ ID NO: | |
| | 1643) | |
| 1644 | AGAACTGCCATGGCTCAGCCGTTTTA | pegRNA; contains gRNA core SEQ |
| | GAGCTAGAAATAGCAAGTTAAAATAA | ID NO: 1854, and TTTT (sequence |
| | GGCTAGTCCGTTATCAACTTGAAAAA | number 1860) 3′ terminal sequence |
| | GTGGCACCGAGTCGGTGCGCAGCCCC | |
| | TTCGAGTACCCACAGTACTACCTGGCT | |
| | GAGCCATGGCAGTTTTT (SEQ ID NO: | |
| | 1644) | |
| 1645 | AGAACTGCCATGGCTCAGCCGTTTTA | pegRNA; contains gRNA core SEQ |
| | GAGCTAGAAATAGCAAGTTAAAATAA | ID NO: 1854, and TTTT (sequence |
| | GGCTAGTCCGTTATCAACTTGAAAAA | number 1860) 3′ terminal sequence |
| | GTGGCACCGAGTCGGTGCGTACGCAG | |
| | CCCCTTCGAGTACCCACAGTACTACCT | |
| | GGCTGAGCCATGGCATTTT (SEQ ID | |
| | NO: 1645) | |
| 1646 | AGAACTGCCATGGCTCAGCCGTTTTA | pegRNA; contains gRNA core SEQ |
| | GAGCTAGAAATAGCAAGTTAAAATAA | ID NO: 1854, and TTTT (sequence |
| | GGCTAGTCCGTTATCAACTTGAAAAA | number 1860) 3′ terminal sequence |
| | GTGGCACCGAGTCGGTGCACGCAGCC | |
| | CCTTCGAGTACCCACAGTACTACCTG | |
| | GCTGAGCCATGGCAGTTTTT (SEQ ID | |
| | NO: 1646) | |
| 494 | CGAGTACCCACAGTACTACCGTTTTA | PE3 ngRNA (TGG PAM); contains |
| | GAGCTAGAAATAGCAAGTTAAAATAA | gRNA core SEQ ID NO: 1854 |
| | GGCTAGTCCGTTATCAACTTGAAAAA | |
| | GTGGCACCGAGTCGGTGC (SEQ ID NO: | |
| | 494) | |
| 496 | CTTCTCCAATGCGACGGGTGGTTTTAG | PE3 ngRNA (TGG PAM); contains |
| | AGCTAGAAATAGCAAGTTAAAATAAG | gRNA core SEQ ID NO: 1854 |
| | GCTAGTCCGTTATCAACTTGAAAAAG | |
| | TGGCACCGAGTCGGTGC (SEQ ID NO: | |
| | 496) | |
| 497 | GTGCCCTTCTCCAATGCGACGTTTTAG | PE3 ngRNA (GGG PAM); contains |
| | AGCTAGAAATAGCAAGTTAAAATAAG | gRNA core SEQ ID NO: 1854 |
| | GCTAGTCCGTTATCAACTTGAAAAAG | |
| | TGGCACCGAGTCGGTGC (SEQ ID NO: | |
| | 497) | |
| 498 | CGTGCCCTTCTCCAATGCGAGTTTTAG | PE3 ngRNA (CGG PAM); contains |
| | AGCTAGAAATAGCAAGTTAAAATAAG | gRNA core SEQ ID NO: 1854 |
| | GCTAGTCCGTTATCAACTTGAAAAAG | |
| | TGGCACCGAGTCGGTGC (SEQ ID NO: | |
| | 498) | |
| 499 | ACAGCCATGAATGGCACAGAGTTTTA | PE3 ngRNA (AGG PAM); contains |
| | GAGCTAGAAATAGCAAGTTAAAATAA | gRNA core SEQ ID NO: 1854 |
| | GGCTAGTCCGTTATCAACTTGAAAAA | |
| | GTGGCACCGAGTCGGTGC (SEQ ID NO: | |
| | 499) | |
| 500 | ACAAGGGCCACAGCCATGAAGTTTTA | PE3 ngRNA (TGG PAM); contains |
| | GAGCTAGAAATAGCAAGTTAAAATAA | gRNA core SEQ ID NO: 1854 |
| | GGCTAGTCCGTTATCAACTTGAAAAA | |
| | GTGGCACCGAGTCGGTGC (SEQ ID NO: | |
| | 500) | |
| 501 | CAGCCACGGGTCAGCCACAAGTTTTA | PE3 ngRNA (GGG PAM); contains |
| | GAGCTAGAAATAGCAAGTTAAAATAA | gRNA core SEQ ID NO: 1854 |
| | GGCTAGTCCGTTATCAACTTGAAAAA | |
| | GTGGCACCGAGTCGGTGC (SEQ ID NO: | |
| | 501) | |
| 502 | GCGTGCCCTTCTCCAATGCGAGTTTTA | PE3 ngRNA (CGG PAM); contains |
| | GAGCTAGAAATAGCAAGTTAAAATAA | gRNA core SEQ ID NO: 1854 |
| | GGCTAGTCCGTTATCAACTTGAAAAA | |
| | GTGGCACCGAGTCGGTGC (SEQ ID NO: | |
| | 502) | |
| 503 | GACAGCCATGAATGGCACAGAGTTTT | PE3 ngRNA (AGG PAM); contains |
| | AGAGCTAGAAATAGCAAGTTAAAATA | gRNA core SEQ ID NO: 1854 |
| | AGGCTAGTCCGTTATCAACTTGAAAA | |
| | AGTGGCACCGAGTCGGTGC (SEQ ID | |
| | NO: 503) | |
| 504 | GCGAGTACCCACAGTACTACCGTTTT | PE3 ngRNA (TGG PAM); contains |
| | AGAGCTAGAAATAGCAAGTTAAAATA | gRNA core SEQ ID NO: 1854 |
| | AGGCTAGTCCGTTATCAACTTGAAAA | |
| | AGTGGCACCGAGTCGGTGC (SEQ ID | |
| | NO: 504) | |
| 505 | CGAGTACCCACAGTACTACCGTTTTA | PE3 ngRNA (TGG PAM); contains |
| | GAGCTAGAAATAGCAAGTTAAAATAA | gRNA core SEQ ID NO: 1854, and |
| | GGCTAGTCCGTTATCAACTTGAAAAA | Linker [AACATTGA (Sequence |
| | GTGGCACCGAGTCGGTGCAACATTGA | Number: 1728)] + Univ. 3′ Motif |
| | CGCGTCTCTACGTGGGGGCGCG (SEQ | [CGCGTCTCTACGTGGGGGCGCG |
| | ID NO: 505) | (Sequence Number: 1850)] |
| 507 | CTTCTCCAATGCGACGGGTGGTTTTAG | PE3 ngRNA (TGG PAM); contains |
| | AGCTAGAAATAGCAAGTTAAAATAAG | gRNA core SEQ ID NO: 1854, and |
| | GCTAGTCCGTTATCAACTTGAAAAAG | Linker [AACATTGA (Sequence |
| | TGGCACCGAGTCGGTGCAACATTGAC | Number: 1728)] + Univ. 3′ Motif |
| | GCGTCTCTACGTGGGGGCGCG (SEQ ID | [CGCGTCTCTACGTGGGGGCGCG |
| | NO: 507) | (Sequence Number: 1850)] |
| 508 | GTGCCCTTCTCCAATGCGACGTTTTAG | PE3 ngRNA (GGG PAM); contains |
| | AGCTAGAAATAGCAAGTTAAAATAAG | gRNA core SEQ ID NO: 1854, and |
| | GCTAGTCCGTTATCAACTTGAAAAAG | Linker [AACATTGA (Sequence |
| | TGGCACCGAGTCGGTGCAACATTGAC | Number: 1728)] + Univ. 3′ Motif |
| | GCGTCTCTACGTGGGGGCGCG (SEQ ID | [CGCGTCTCTACGTGGGGGCGCG |
| | NO: 508) | (Sequence Number: 1850)] |
| 509 | CGTGCCCTTCTCCAATGCGAGTTTTAG | PE3 ngRNA (CGG PAM); contains |
| | AGCTAGAAATAGCAAGTTAAAATAAG | gRNA core SEQ ID NO: 1854, and |
| | GCTAGTCCGTTATCAACTTGAAAAAG | Linker [AACATTGA (Sequence |
| | TGGCACCGAGTCGGTGCAACATTGAC | Number: 1728)] + Univ. 3′ Motif |
| | GCGTCTCTACGTGGGGGCGCG (SEQ ID | [CGCGTCTCTACGTGGGGGCGCG |
| | NO: 509) | (Sequence Number: 1850)] |
| 510 | ACAGCCATGAATGGCACAGAGTTTTA | PE3 ngRNA (AGG PAM); contains |
| | GAGCTAGAAATAGCAAGTTAAAATAA | gRNA core SEQ ID NO: 1854, and |
| | GGCTAGTCCGTTATCAACTTGAAAAA | Linker [AACATTGA (Sequence |
| | GTGGCACCGAGTCGGTGCAACATTGA | Number: 1728)] + Univ. 3′ Motif |
| | CGCGTCTCTACGTGGGGGCGCG (SEQ | [CGCGTCTCTACGTGGGGGCGCG |
| | ID NO: 510) | (Sequence Number: 1850)] |
| 511 | ACAAGGGCCACAGCCATGAAGTTTTA | PE3 ngRNA (TGG PAM); contains |
| | GAGCTAGAAATAGCAAGTTAAAATAA | gRNA core SEQ ID NO: 1854, and |
| | GGCTAGTCCGTTATCAACTTGAAAAA | Linker [AACATTGA (Sequence |
| | GTGGCACCGAGTCGGTGCAACATTGA | Number: 1728)] + Univ. 3′ Motif |
| | CGCGTCTCTACGTGGGGGCGCG (SEQ | [CGCGTCTCTACGTGGGGGCGCG |
| | ID NO: 511) | (Sequence Number: 1850)] |
| 512 | CAGCCACGGGTCAGCCACAAGTTTTA | PE3 ngRNA (GGG PAM); contains |
| | GAGCTAGAAATAGCAAGTTAAAATAA | gRNA core SEQ ID NO: 1854, and |
| | GGCTAGTCCGTTATCAACTTGAAAAA | Linker [AACATTGA (Sequence |
| | GTGGCACCGAGTCGGTGCAACATTGA | Number: 1728)] + Univ. 3′ Motif |
| | CGCGTCTCTACGTGGGGGCGCG (SEQ | [CGCGTCTCTACGTGGGGGCGCG |
| | ID NO: 512) | (Sequence Number: 1850)] |
| 513 | GTGCCCTTCTCCAATGCGACGTTTTAG | PE3 ngRNA (GGG PAM); contains |
| | AGCTAGAAATAGCAAGTTAAAATAAG | gRNA core SEQ ID NO: 1854, Linker |
| | GCTAGTCCGTTATCAACTTGAAAAAG | [AACATTGA (Sequence Number: |
| | TGGCACCGAGTCGGTGCAACATTGAC | 1728)] + Univ. 3′ Motif |
| | GCGTCTCTACGTGGGGGCGCGTTTTTT | [CGCGTCTCTACGTGGGGGCGCG |
| | T (SEQ ID NO: 513) | (Sequence Number: 1850)], and |
| | | transcription adaptations |
| 514 | GCGTGCCCTTCTCCAATGCGAGTTTTA | PE3 ngRNA (CGG PAM); contains |
| | GAGCTAGAAATAGCAAGTTAAAATAA | gRNA core SEQ ID NO: 1854, Linker |
| | GGCTAGTCCGTTATCAACTTGAAAAA | [AACATTGA (Sequence Number: |
| | GTGGCACCGAGTCGGTGCAACATTGA | 1728)] + Univ. 3′ Motif |
| | CGCGTCTCTACGTGGGGGCGCGTTTTT | [CGCGTCTCTACGTGGGGGCGCG |
| | TT (SEQ ID NO: 514) | (Sequence Number: 1850)], and |
| | | transcription adaptations |
| 515 | GACAGCCATGAATGGCACAGAGTTTT | PE3 ngRNA (AGG PAM); contains |
| | AGAGCTAGAAATAGCAAGTTAAAATA | gRNA core SEQ ID NO: 1854, Linker |
| | AGGCTAGTCCGTTATCAACTTGAAAA | [AACATTGA (Sequence Number: |
| | AGTGGCACCGAGTCGGTGCAACATTG | 1728)] + Univ. 3′ Motif |
| | ACGCGTCTCTACGTGGGGGCGCGTTTT | [CGCGTCTCTACGTGGGGGCGCG |
| | TTT (SEQ ID NO: 515) | (Sequence Number: 1850)], and |
| | | transcription adaptations |
| 516 | GCGAGTACCCACAGTACTACCGTTTT | PE3 ngRNA (TGG PAM); contains |
| | AGAGCTAGAAATAGCAAGTTAAAATA | gRNA core SEQ ID NO: 1854, Linker |
| | AGGCTAGTCCGTTATCAACTTGAAAA | [AACATTGA (Sequence Number: |
| | AGTGGCACCGAGTCGGTGCAACATTG | 1728)] + Univ. 3′ Motif |
| | ACGCGTCTCTACGTGGGGGCGCGTTTT | [CGCGTCTCTACGTGGGGGCGCG |
| | TTT (SEQ ID NO: 516) | (Sequence Number: 1850)], and |
| | | transcription adaptations |

[0257] Exemplary combinations of PEgRNA components, e.g., spacer, PBS, and edit template/RTT, exemplary full-length PEgRNAs, as well as combinations of PEgRNA and corresponding ngRNA(s) are provided in Tables 1-7. Tables 1-7 each contain three columns. The left column is the sequence number. The middle column provides the sequence of the component, labeled with a SEQ ID NO where required by ST.26 standard. Although all the sequences provided in Tables 1-7 are RNA sequences, “T” is used instead of a “U” in the sequences for consistency with the ST.26 standard. The right column contains a description of the sequence. All of the RTT and full-length PEgRNAs in Tables 1-7 are designed to correct a c.68C→A mutation in the RHO gene, a mutation which results in a P23H mutation in the encoded rhodopsin protein. However, the disclosed RTT and full-length PEgRNA are also capable of correcting other mutations in the RHO gene that are found in the portion of the gene that shares homology or complementarity with the edit template/RTT.

[0258] The PEgRNAs exemplified in Tables 1-7 comprise: (a) a spacer comprising at its 3′ end a sequence corresponding to a listed PEgRNA spacer sequence; (b) a gRNA core capable of complexing with a Cas9 protein, and (c) an extension arm comprising: (i) an editing template comprising at its 3′ end any RTT sequence from the same table as the PEgRNA spacer, and (ii) a prime binding site (PBS) comprising at its 5′ end any PBS sequence from the same table as the PEgRNA spacer. The PEgRNA spacer can be, for example, 17-22 nucleotides in length. The PEgRNA spacers in Tables 1-7 are annotated with their PAM sequence(s), enabling the selection of a prime editor comprising an appropriate Cas9 protein. The editing template can be referred to as a reverse transcription template (RTT). The editing template can encode wildtype RHO gene sequence (annotated as simply RTT in Tables 1-7). Alternatively, the editing template can encode one or more synonymous mutations relative to the wildtype RHO gene. The one or more synonymous mutations can be PAM silencing mutations. RTT encoding synonymous PAM silencing mutations are annotated as such in Tables 1-7. In some of Tables 1-7, RTT are further annotated with a * followed by a number code. As described below, a PE3 or PE3b ngRNA spacer annotated with the same * and number code as an RTT has perfect complementarity to the edit strand post-edit by a PEgRNA containing the RTT. The PBS can be, for example, 5 to 19 nucleotides in length.

[0259] The PEgRNA provided in Tables 1-7 can comprise, from 5′ to 3′, the spacer, the gRNA core, the edit template, and the PBS. The 3′ end of the edit template can be contiguous with the 5′ end of the PBS. The PEgRNA can comprise multiple RNA molecules or can be a single RNA molecule. Any PEgRNA exemplified in Tables 1-7 may comprise, or further comprise, a 3′ motif at the 3′ end of the extension arm, such as a universal motif, a sequence specific motif, or a series of 1, 2, 3, 4, 5, 6, 7 or more U nucleotides. In some embodiments, a universal or structural 3′ motif that is capable of forming a tertiary structure on its own such as a hairpin, a pseudoknot, or other RNA structure is used. In some embodiments, a sequence specific motif is used that is designed to hybridize with a portion of the RTT while not covering the PBS. Whether a universal or sequence specific motif is used, it can be connected to the 3′ of the PBS via a linker sequence. In some embodiments, the PEgRNA comprises 4 U nucleotides at its 3′ end. Without being bound by theory, such 3′ motifs are believed to increase PEgRNA stability. The PEgRNA may be chemically synthesized and may alternatively or additionally comprise one or more chemical modifications, such as phosphorothioate (PS) bond(s), 2′-O-methylated (2′-Ome) nucleotides, or a combination thereof. In some embodiments, the PEgRNA comprise 3′ mN*mN*mN*N and 5′ mN*mN*mN* modifications, where m indicates that the nucleotide contains a 2′-O-Me modification and a * indicates the presence of a phosphorothioate bond. PEgRNA sequences exemplified in Tables 1-7 may alternatively be adapted for expression from a nucleic acid template with a U6 promoter, for example, by including a 5′ terminal G if the spacer of the PEgRNA begins with another nucleotide, by including 6 or 7 U nucleotides at the 3′ end of the extension arm, or both. Such transcription-adapted sequences may further comprise a universal or sequence specific motif between the PBS and the 3′ terminal U series.

[0260] Any of the PEgRNAs of Tables 1-7 can be used in a Prime Editing system further comprising a nick guide RNA (ngRNA). Such a system may be referred to as a PE3 Prime Editing system. The ngRNA can comprise a spacer comprising at its 3′ end a sequence corresponding to nucleotides 4-20 of any ngRNA spacer listed in the same table as the PEgRNA spacer and a gRNA core capable of complexing with a Cas9 protein. For example, the sequence in the spacer of the ngRNA can comprise nucleotides 4-20, 3-20, 2-20, or 1-20 of the listed spacer. In some embodiments, the spacer of the ngRNA is the complete sequence of an ngRNA spacer listed in the same table as the PEgRNA spacer. The ngRNA spacers in Tables 1-7 are annotated with their PAM sequences, enabling selection of an appropriate Cas9 protein. It can be advantageous to select an ngRNA spacer that has a PAM sequence compatible with the Cas9 protein used in the Prime Editor with the PEgRNA, thus avoiding the need to use two different Cas9 proteins. The ngRNA can comprise multiple RNA molecules (e.g., a crRNA containing the ngRNA spacer and a tracrRNA) or can be a single gRNA molecule. The ngRNA is capable of directing a complexed Cas9 protein to bind the edit strand of the RHO gene; thus, a complexed Cas9 nickase containing a nuclease inactivating mutation in the HNH domain will nick the non-edit strand. A PE3 ngRNA spacer has perfect complementarity to the edit strand both pre- and post-edit; a PE3b ngRNA spacer has perfect complementarity to the edit strand post-edit. A PE3 or PE3b spacer annotated with a * followed by a number code has perfect complementarity to the edit strand post-edit with a PEgRNA containing an RTT from the same Table and annotated with the same number code.

[0261] Any ngRNA sequence provided in Tables 1-7 may comprise, or further comprise, a 3′ motif at their 3′ end, for example, a series of 1, 2, 3, 4, 5, 6, 7 or more U nucleotides. In some embodiments, the ngRNA comprises 4 U nucleotides at its 3′ end. Without being bound by theory, such 3′ motifs are believed to increase ngRNA stability. The ngRNA may be chemically synthesized and may alternatively or additionally comprise one or more chemical modifications, such as phosphorothioate (PS) bond(s), 2′-O-methylated (2′-Ome) nucleotides, or a combination thereof. In some embodiments, the ngRNA comprise 3′ mN*mN*mN*N and 5′ mN*mN*mN* modifications, where m indicates that the nucleotide contains a 2′-O-Me modification and a * indicates the presence of a phosphorothioate bond. NgRNA sequences may alternatively be adapted for expression from a DNA template, for example, by including a 5′ terminal G if the spacer of the ngRNA begins with another nucleotide, by including 6 or 7 U nucleotides at the 3′ end of the ngRNA, or both.

[0262] In some embodiments, the gRNA core for the PEgRNA and/or the ngRNA comprises a sequence selected from SEQ ID NOs: 1854, 1855, 1856, 1857, 1858, or 1859. In some embodiments, the gRNA core comprises SEQ ID NO: 7544. In some embodiments, the gRNA core comprises SEQ ID NO: 1855. In some embodiments, the gRNA core comprises SEQ ID NO: 1856. In some embodiments, the gRNA core comprises SEQ ID NO: 1857. In some embodiments, the gRNA core comprises SEQ ID NO: 1858. In some embodiments, the gRNA core comprises SEQ ID NO: 1859.

[0263] Table 1 provides Prime Editing guide RNAs (PEgRNAs) that can be used with any Prime Editor containing a Cas9 protein capable of recognizing a GGG PAM sequence. The PEgRNAs of Table 1 can also be used in Prime Editing systems further comprising a nick guide RNA (ngRNA). Such PEgRNAs and Prime Editing systems can be used, for example, to correct c.68C→A (P23H) mutation in the RHO gene. However, the PEgRNA disclosed in Table 1 are also capable of correcting any other mutations in the RHO gene that are found in the portion of the gene that shares homology or complementarity with the edit template/RTT.

[0264] The PEgRNAs exemplified in Table 1 comprise: (a) a spacer comprising at its 3′ end a sequence corresponding to sequence number 1; (b) a gRNA core capable of complexing with a Cas9 protein, and (c) an extension arm comprising: (i) an editing template comprising at its 3′ end a sequence corresponding to any one of sequence numbers 22 or 23, and (ii) a prime binding site (PBS) comprising at its 5′ end a sequence corresponding to sequence number 7. The PEgRNA spacer can be, for example, 17-22 nucleotides in length and can comprise the sequence corresponding to any one of sequence numbers 1-6. In some embodiments, the PEgRNA spacer comprises sequence number 4. The PEgRNA spacers in Table 1 are annotated with their PAM sequence(s), enabling the selection of an appropriate Cas9 protein. The editing template can be referred to as a reverse transcription template (RTT). The editing template can encode wildtype RHO gene sequence. For example, the editing template can comprise at its 3′ end the sequence corresponding to sequence number 22, 24, 26, 28, 30, 32, 34, 36, 38, 40, 42, 44, 46, 48, 50, 52, 54, 56, 58, 60, 62, 64, 66, 68, or 70. Alternatively, the editing template can encode one or more synonymous mutations relative to the wildtype RHO gene. The editing template can encode one or more synonymous mutations that are PAM silencing mutations and can comprise at its 3′ end the sequence corresponding to sequence number 23, 25, 27, 29, 31, 33, 35, 37, 39, 41, 43, 45, 47, 49, 51, 53, 55, 57, 59, 61, 63, 65, 67, 69, or 71. The PBS can be, for example, 5 to 19 nucleotides in length and can comprise the sequence corresponding to any one of sequence numbers 7-21.

[0265] The PEgRNA can comprise, from 5′ to 3′, the spacer, the gRNA core, the edit template, and the PBS. The 3′ end of the edit template can be contiguous with the 5′ end of the PBS. The PEgRNA can comprise multiple RNA molecules or can be a single RNA molecule. Exemplary PEgRNAs provided in Table 1 can comprise a sequence corresponding to any one of sequence numbers 83, 84, 85, 86, 87, 88, 89, 90, 91, 92, 93, 94, 95, 96, 97, 98, 99, 100, 101, 102, 103, 104, 105, 106, 107, 108, 109, 110, 111, 112, 113, 114, 115, 116, 117, 118, 119, 120, 121, 122, 123, 124, 125, 126, 127, 128, 129, 130, 131, 132, 133, 134, 135, 136, 137, 138, 139, 140, 141, 142, 143, 144, 145, 146, 147, 148, 149, 150, 151, 152, 153, 154, 155, 156, 157, 158, 159, 160, 161, 162, 163, 164, 165, 166, 167, 168, 169, 170, 171, 172, 173, 174, 175, 176, 177, 178, 179, 180, 181, 182, 183, 184, 185, 186, 187, 188, 189, 190, 191, 192, 193, 194, 195, 196, 197, 198, 199, 200, 201, 202, 203, 204, 205, 206, 207, 208, 209, 210, 211, 212, 213, 214, 215, 216, 217, 218, 219, 220, 221, 222, 223, 224, 225, 226, 227, 228, 229, 230, 231, 232, 233, 234, 235, 236, 237, 238, 239, 240, 241, 242, 243, 244, 245, 246, 247, 248, 249, 250, 251, 252, 253, 254, 255, 256, 257, 258, 259, 260, 261, 262, 263, 264, 265, 266, 267, 268, 269, 270, 271, 272, 273, 274, 275, 276, 277, 278, 279, 280, 281, 282, 283, 284, 285, 286, 287, 288, 289, 290, 291, 292, 293, 294, 295, 296, 297, 298, 299, 300, 301, 302, 303, 304, 305, 306, 307, 308, 309, 310, 311, 312, 313, 314, 315, 316, 317, 318, 319, 320, 321, 322, 323, 324, 325, 326, 327, 328, 329, 330, 331, 332, 333, 334, 335, 336, 337, 338, 339, 340, 341, 342, 343, 344, 345, 346, 347, 348, 349, 350, 351, 352, 353, 354, 355, 356, 357, 358, 359, 360, 361, 362, 363, 364, 365, 366, 367, 368, 369, 370, 371, 372, 373, 374, 375, 376, 377, 378, 379, 380, 381, 382, 383, 384, 385, 386, 387, 388, 389, 390, 391, 392, 393, 394, 395, 396, 397, 398, 399, 400, 401, 402, 403, 404, 405, 406, 407, 408, 409, 410, 411, 412, 413, 414, 415, 416, 417, 418, 419, 420, 421, 422, 423, 424, 425, 426, 427, 428, 429, 430, 431, 432, 433, 434, 435, 436, 437, 438, 439, 440, 441, 442, 443, 444, 445, 446, 447, 448, 449, 450, 451, 452, 453, 454, 455, 456, 457, 458, 459, 460, 461, 462, 463, 464, 465, 466, 467, 468, 469, 470, 471, 472, 473, 474, 475, 476, 477, 478, 479, 480, 481, 482, 483, 484, 485, 486, 487, 488, 489, 490, 491, 492, or 493. Any PEgRNA exemplified in Table 1 may comprise, or further comprise, a 3′ motif at the 3′ end of the extension arm, such as a universal motif, a sequence specific motif, or a series of 1, 2, 3, 4, 5, 6, 7 or more U nucleotides. In some embodiments, a universal or structural 3′ motif that is capable of forming a tertiary structure on its own such as a hairpin, a pseudoknot, or other RNA structure is used. In some embodiments, a sequence specific motif is used that is designed to hybridize with a portion of the RTT while not covering the PBS. Whether a universal or sequence specific motif is used, it can be connected to the 3′ of the PBS via a linker sequence. In some embodiments, the PEgRNA comprises 4 U nucleotides at its 3′ end. Without being bound by theory, such 3′ motifs are believed to increase PEgRNA stability. The PEgRNA may alternatively or additionally comprise one or more chemical modifications, such as phosphorothioate (PS) bond(s), 2′-O-methylated (2′-Ome) nucleotides, or a combination thereof. In some embodiments, the PEgRNA comprise 3′ mN*mN*mN*N and 5′ mN*mN*mN* modifications, where m indicates that the nucleotide contains a 2′-O-Me modification and a * indicates the presence of a phosphorothioate bond. PEgRNA sequences exemplified in Table 1 may alternatively be adapted for expression from a nucleic acid template with a U6 promoter, for example, by including a 5′ terminal G if the spacer of the PEgRNA begins with another nucleotide, by including 6 or 7 U nucleotides at the 3′ end of the extension arm, or both. Such transcription-adapted sequences may further comprise a universal or sequence specific motif between the PBS and the 3′ terminal U series. The modifications included in the selection of full length PEgRNAs included in Table 1 are annotated in column 3 of Table 1.

[0266] Any of the PEgRNAs of Table 1 can be used in a Prime Editing system further comprising a nick guide RNA (ngRNA). Such ngRNA can comprise a spacer comprising at its 3′ end a sequence corresponding to nucleotides 4-20 of any ngRNA spacer listed in Table 1 and a gRNA core capable of complexing with a Cas9 protein. For example, the sequence in the spacer of the ngRNA can comprise nucleotides 4-20, 3-20, 2-20, or 1-20 of any one of sequence numbers 72-82. In some embodiments, the spacer of the ngRNA is a ngRNA spacer listed in Table 1. The ngRNA spacers in Table 1 are annotated with their PAM sequences, enabling selection of an appropriate Cas9 protein. It can be advantageous to select a ngRNA spacer that has a PAM sequence compatible with the Cas9 protein used in the Prime Editor, thus avoiding the need to use two different Cas9 proteins. The ngRNA is capable of directing a complexed Cas9 protein to bind the edit strand of the RHO gene; thus, a complexed Cas9 nickase containing a nuclease inactivating mutation in the HNH domain will nick the non-edit strand. A PE3 ngRNA spacer has perfect complementarity to the edit strand both pre- and post-edit; a PE3b ngRNA spacer has perfect complementarity to the edit strand post-edit. A PE3 or PE3b ngRNA spacer in Table 1 annotated with the same * and number code as an RTT in Table 1 has perfect complementarity to the edit strand post-edit by a PEgRNA containing the RTT. Exemplary ngRNA provided in Table 1 can comprise a sequence corresponding to sequence number 494, 495, 496, 497, 498, 499, 500, 501, 502, 503, 504, 505, 506, 507, 508, 509, 510, 511, 512, 513, 514, 515, or 516.

[0267] Table 2 provides Prime Editing guide RNAs (PEgRNAs) that can be used with any Prime Editor containing a Cas9 protein capable of recognizing a TGG PAM sequence. The PEgRNAs of Table 2 can also be used in Prime Editing systems further comprising a nick guide RNA (ngRNA). Such PEgRNAs and Prime Editing systems can be used, for example, to correct c.68C→A (P23H) mutation in the RHO gene. However, the PEgRNA disclosed in Table 2 are also capable of correcting any other mutations in the RHO gene that are found in the portion of the gene that shares homology or complementarity with the edit template/RTT.

[0268] The PEgRNAs exemplified in Table 2 comprise: (a) a spacer comprising at its 3′ end a sequence corresponding to sequence number 517; (b) a gRNA core capable of complexing with a Cas9 protein, and (c) an extension arm comprising: (i) an editing template comprising at its 3′ end a sequence corresponding to any one of sequence numbers 538-542, and (ii) a prime binding site (PBS) comprising at its 5′ end a sequence corresponding to sequence number 523. The PEgRNA spacer can be, for example, 17-22 nucleotides in length and can comprise the sequence corresponding to any one of sequence numbers 517-522. In some embodiments, the PEgRNA spacer comprises sequence number 520. The PEgRNA spacers in Table 2 are annotated with their PAM sequence(s), enabling the selection of an appropriate Cas9 protein. The editing template can be referred to as a reverse transcription template (RTT). The editing template can encode wildtype RHO gene sequence. For example, the editing template can comprise at its 3′ end the sequence corresponding to sequence number 538, 543, 548, 553, 558, 563, 568, 573, 578, 583, 588, 593, 598, 603, 608, 613, 618, 623, 628, 633, 638, 643, 648, 653, 658, 663, 668, 673, 678, 683, or 688. Alternatively, the editing template can encode one or more synonymous mutations relative to the wildtype RHO gene. The editing template can encode one or more synonymous mutations that are PAM silencing mutations and can comprise at its 3′ end the sequence corresponding to sequence number 539, 540, 541, 542, 544, 545, 546, 547, 549, 550, 551, 552, 554, 555, 556, 557, 559, 560, 561, 562, 564, 565, 566, 567, 569, 570, 571, 572, 574, 575, 576, 577, 579, 580, 581, 582, 584, 585, 586, 587, 589, 590, 591, 592, 594, 595, 596, 597, 599, 600, 601, 602, 604, 605, 606, 607, 609, 610, 611, 612, 614, 615, 616, 617, 619, 620, 621, 622, 624, 625, 626, 627, 629, 630, 631, 632, 634, 635, 636, 637, 639, 640, 641, 642, 644, 645, 646, 647, 649, 650, 651, 652, 654, 655, 656, 657, 659, 660, 661, 662, 664, 665, 666, 667, 669, 670, 671, 672, 674, 675, 676, 677, 679, 680, 681, 682, 684, 685, 686, 687, 689, 690, 691, 692. The PBS can be, for example, 5 to 19 nucleotides in length and can comprise the sequence corresponding to any one of sequence numbers 523-537.

[0269] The PEgRNA can comprise, from 5′ to 3′, the spacer, the gRNA core, the edit template, and the PBS. The 3′ end of the edit template can be contiguous with the 5′ end of the PBS. The PEgRNA can comprise multiple RNA molecules or can be a single RNA molecule. Exemplary PEgRNAs provided in Table 2 can comprise a sequence corresponding to any one of sequence numbers 697, 698, 699, 700, 701, 702, 703, 704, 705, 706, 707, 708, 709, 710, 711, 712, 713, 714, 715, 716, 717, 718, 719, 720, 721, 722, 723, 724, 725, 726, 727, or 728. Any PEgRNA exemplified in Table 2 may comprise, or further comprise, a 3′ motif at the 3′ end of the extension arm, such as a universal motif, a sequence specific motif, or a series of 1, 2, 3, 4, 5, 6, 7 or more U nucleotides. In some embodiments, a universal or structural 3′ motif that is capable of forming a tertiary structure on its own such as a hairpin, a pseudoknot, or other RNA structure is used. In some embodiments, a sequence specific motif is used that is designed to hybridize with a portion of the RTT while not covering the PBS. Whether a universal or sequence specific motif is used, it can be connected to the 3′ of the PBS via a linker sequence. In some embodiments, the PEgRNA comprises 4 U nucleotides at its 3′ end. Without being bound by theory, such 3′ motifs are believed to increase PEgRNA stability. The PEgRNA may alternatively or additionally comprise one or more chemical modifications, such as phosphorothioate (PS) bond(s), 2′-O-methylated (2′-Ome) nucleotides, or a combination thereof. In some embodiments, the PEgRNA comprise 3′ mN*mN*mN*N and 5′ mN*mN*mN* modifications, where m indicates that the nucleotide contains a 2′-O-Me modification and a * indicates the presence of a phosphorothioate bond. PEgRNA sequences exemplified in Table 2 may alternatively be adapted for expression from a nucleic acid template with a U6 promoter, for example, by including a 5′ terminal G if the spacer of the PEgRNA begins with another nucleotide, by including 6 or 7 U nucleotides at the 3′ end of the extension arm, or both. Such transcription-adapted sequences may further comprise a universal or sequence specific motif between the PBS and the 3′ terminal U series. The modifications included in the selection of full length PEgRNAs included in Table 2 are annotated in column 3 of Table 2.

[0270] Any of the PEgRNAs of Table 2 can be used in a Prime Editing system further comprising a nick guide RNA (ngRNA). Such ngRNA can comprise a spacer comprising at its 3′ end a sequence corresponding to nucleotides 4-20 of any ngRNA spacer listed in Table 2 and a gRNA core capable of complexing with a Cas9 protein. For example, the sequence in the spacer of the ngRNA can comprise nucleotides 4-20, 3-20, 2-20, or 1-20 of sequence number 72, 73, 74, 693, 694, 75, 76, 77, 695, 78, 696, 79, or 80. In some embodiments, the spacer of the ngRNA is a ngRNA spacer listed in Table 2. The ngRNA spacers in Table 2 are annotated with their PAM sequences, enabling selection of an appropriate Cas9 protein. It can be advantageous to select a ngRNA spacer that has a PAM sequence compatible with the Cas9 protein used in the Prime Editor, thus avoiding the need to use two different Cas9 proteins. The ngRNA is capable of directing a complexed Cas9 protein to bind the edit strand of the RHO gene; thus, a complexed Cas9 nickase containing a nuclease inactivating mutation in the HNH domain will nick the non-edit strand. A PE3 ngRNA spacer has perfect complementarity to the edit strand both pre- and post-edit; a PE3b ngRNA spacer has perfect complementarity to the edit strand post-edit. A PE3 or PE3b ngRNA spacer in Table 2 annotated with the same * and number code as an RTT in Table 2 has perfect complementarity to the edit strand post-edit by a PEgRNA containing the RTT. Exemplary ngRNA provided in Table 2 can comprise a sequence corresponding to sequence number 496, 497, 498, 499, 500, 501, 502, 503, 507, 508, 509, 510, 511, 512, 513, 514, or 515.

[0271] Table 3 provides Prime Editing guide RNAs (PEgRNAs) that can be used with any Prime Editor containing a Cas9 protein capable of recognizing a TGG PAM sequence. The PEgRNAs of Table 3 can also be used in Prime Editing systems further comprising a nick guide RNA (ngRNA). Such PEgRNAs and Prime Editing systems can be used, for example, to correct c.68C→A (P23H) mutation in the RHO gene. However, the PEgRNA disclosed in Table 3 are also capable of correcting any other mutations in the RHO gene that are found in the portion of the gene that shares homology or complementarity with the edit template/RTT.

[0272] The PEgRNAs exemplified in Table 3 comprise: (a) a spacer comprising at its 3′ end a sequence corresponding to sequence number 729; (b) a gRNA core capable of complexing with a Cas9 protein, and (c) an extension arm comprising: (i) an editing template comprising at its 3′ end a sequence corresponding to any one of sequence numbers 749-753, and (ii) a prime binding site (PBS) comprising at its 5′ end a sequence corresponding to sequence number 734. The PEgRNA spacer can be, for example, 17-22 nucleotides in length and can comprise the sequence corresponding to any one of sequence numbers 729, 730, 731, 76, 732, or 733. In some embodiments, the PEgRNA spacer comprises sequence number 76. The PEgRNA spacers in Table 3 are annotated with their PAM sequence(s), enabling the selection of an appropriate Cas9 protein. The editing template can be referred to as a reverse transcription template (RTT). The editing template can encode wildtype RHO gene sequence. For example, the editing template can comprise at its 3′ end the sequence corresponding to sequence number 750, 754, 758, 762, 766, 770, 774, 778, 782, 786, 790, 794, 798, 802, 806, 810, 814, 818, 822, 826, 830, 834, 838, 842, or 846. Alternatively, the editing template can encode one or more synonymous mutations relative to the wildtype RHO gene. The editing template can encode one or more synonymous mutations that are PAM silencing mutations and can comprise at its 3′ end the sequence corresponding to sequence number 749, 751, 752, 753, 755, 756, 757, 759, 760, 761, 763, 764, 765, 767, 768, 769, 771, 772, 773, 775, 776, 777, 779, 780, 781, 783, 784, 785, 787, 788, 789, 791, 792, 793, 795, 796, 797, 799, 800, 801, 803, 804, 805, 807, 808, 809, 811, 812, 813, 815, 816, 817, 819, 820, 821, 823, 824, 825, 827, 828, 829, 831, 832, 833, 835, 836, 837, 839, 840, 841, 843, 844, 845, 847, or 848. The PBS can be, for example, 5 to 19 nucleotides in length and can comprise the sequence corresponding to any one of sequence numbers 734-748.

[0273] The PEgRNA can comprise, from 5′ to 3′, the spacer, the gRNA core, the edit template, and the PBS. The 3′ end of the edit template can be contiguous with the 5′ end of the PBS. The PEgRNA can comprise multiple RNA molecules or can be a single RNA molecule. Exemplary PEgRNAs provided in Table 3 can comprise a sequence corresponding to any one of sequence numbers 863, 864, 865, 866, 867, 868, 869, 870, 871, 872, 873, 874, 875, 876, 877, 878, 879, 880, 881, 882, 883, 884, 885, 886, 887, 888, 889, 890, 891, 892, 893, 894, 895, 896, 897, 898, 899, 900, 901, 902, 903, 904, 905, 906, 907, 908, 909, 910, 911, 912, 913, 914, 915, 916, 917, 918, 919, 920, 921, 922, 923, 924, 925, 926, 927, 928, 929, 930, 931, 932, 933, 934, 935, 936, 937, 938, 939, 940, 941, 942, 943, 944, 945, 946, 947, 948, 949, 950, 951, 952, 953, 954, 955, 956, 957, 958, 959, 960, 961, 962, 963, 964, 965, 966, 967, 968, 969, 970, 971, 972, 973, 974, 975, 976, 977, 978, 979, 980, 981, 982, 983, 984, 985, 986, 987, 988, 989, 990, 991, 992, 993, 994, 995, 996, 997, 998, 999, 1000, 1001, 1002, 1003, 1004, 1005, 1006, 1007, 1008, 1009, 1010, 1011, 1012, 1013, 1014, 1015, 1016, 1017, 1018, 1019, 1020, 1021, 1022, 1023, 1024, 1025, 1026, 1027, 1028, 1029, 1030, 1031, 1032, 1033, 1034, 1035, 1036, 1037, 1038, 1039, 1040, 1041, 1042, 1043, 1044, 1045, 1046, 1047, 1048, 1049, 1050, 1051, 1052, 1053, 1054, 1055, 1056, 1057, 1058, 1059, 1060, 1061, 1062, 1063, 1064, 1065, 1066, 1067, 1068, 1069, 1070, 1071, 1072, 1073, 1074, 1075, 1076, 1077, 1078, 1079, 1080, 1081, 1082, 1083, 1084, 1085, 1086, 1087, 1088, 1089, 1090, 1091, 1092, 1093, 1094, 1095, 1096, 1097, 1098, 1099, 1100, 1101, 1102, 1103, 1104, 1105, 1106, 1107, 1108, 1109, 1110, 1111, 1112, 1113, 1114, 1115, 1116, 1117, 1118, 1119, 1120, 1121, 1122, 1123, 1124, 1125, 1126, 1127, 1128, 1129, 1130, 1131, 1132, 1133, 1134, 1135, 1136, 1137, 1138, 1139, 1140, 1141, 1142, 1143, 1144, 1145, 1146, 1147, 1148, 1149, 1150, 1151, 1152, 1153, 1154, 1155, or 1156. Any PEgRNA exemplified in Table 3 may comprise, or further comprise, a 3′ motif at the 3′ end of the extension arm, such as a universal motif, a sequence specific motif, or a series of 1, 2, 3, 4, 5, 6, 7 or more U nucleotides. In some embodiments, a universal or structural 3′ motif that is capable of forming a tertiary structure on its own such as a hairpin, a pseudoknot, or other RNA structure is used. In some embodiments, a sequence specific motif is used that is designed to hybridize with a portion of the RTT while not covering the PBS. Whether a universal or sequence specific motif is used, it can be connected to the 3′ of the PBS via a linker sequence. In some embodiments, the PEgRNA comprises 4 U nucleotides at its 3′ end. Without being bound by theory, such 3′ motifs are believed to increase PEgRNA stability. The PEgRNA may alternatively or additionally comprise one or more chemical modifications, such as phosphorothioate (PS) bond(s), 2′-O-methylated (2′-Ome) nucleotides, or a combination thereof. In some embodiments, the PEgRNA comprise 3′ mN*mN*mN*N and 5′ mN*mN*mN* modifications, where m indicates that the nucleotide contains a 2′-O-Me modification and a * indicates the presence of a phosphorothioate bond. PEgRNA sequences exemplified in Table 3 may alternatively be adapted for expression from a nucleic acid template with a U6 promoter, for example, by including a 5′ terminal G if the spacer of the PEgRNA begins with another nucleotide, by including 6 or 7 U nucleotides at the 3′ end of the extension arm, or both. Such transcription-adapted sequences may further comprise a universal or sequence specific motif between the PBS and the 3′ terminal U series. The modifications included in the selection of full length PEgRNAs included in Table 3 are annotated in column 3 of Table 3.

[0274] Any of the PEgRNAs of Table 3 can be used in a Prime Editing system further comprising a nick guide RNA (ngRNA). Such ngRNA can comprise a spacer comprising at its 3′ end a sequence corresponding to nucleotides 4-20 of any ngRNA spacer listed in Table 3 and a gRNA core capable of complexing with a Cas9 protein. For example, the sequence in the spacer of the ngRNA can comprise nucleotides 4-20, 3-20, 2-20, or 1-20 of sequence number 849, 850, 851, 520, 852, 853, 854, 4, 855, 856, 857, 858, 859, 860, 861, or 862. In some embodiments, the spacer of the ngRNA is a ngRNA spacer listed in Table 3. The ngRNA spacers in Table 3 are annotated with their PAM sequences, enabling selection of an appropriate Cas9 protein. It can be advantageous to select a ngRNA spacer that has a PAM sequence compatible with the Cas9 protein used in the Prime Editor, thus avoiding the need to use two different Cas9 proteins. The ngRNA is capable of directing a complexed Cas9 protein to bind the edit strand of the RHO gene; thus, a complexed Cas9 nickase containing a nuclease inactivating mutation in the HNH domain will nick the non-edit strand. A PE3 ngRNA spacer has perfect complementarity to the edit strand both pre- and post-edit; a PE3b ngRNA spacer has perfect complementarity to the edit strand post-edit. A PE3 or PE3b ngRNA spacer in Table 3 annotated with the same * and number code as an RTT in Table 3 has perfect complementarity to the edit strand post-edit by a PEgRNA containing the RTT. Exemplary ngRNA provided in Table 3 can comprise a sequence corresponding to sequence number 1157, 1158, 1159, 1160, 1161, 1162, 1163, 1164, 1165, 1166, 1167, 1168, 1169, 1170, 1171, 1172, 1173, 1174, 1175, 1176, 1177, 1178, 1179, 1180, 1181, 1182, 1183, 1184, 1185, or 1186.

[0275] Table 4 provides Prime Editing guide RNAs (PEgRNAs) that can be used with any Prime Editor containing a Cas9 protein capable of recognizing a CGG PAM sequence. The PEgRNAs of Table 4 can also be used in Prime Editing systems further comprising a nick guide RNA (ngRNA). Such PEgRNAs and Prime Editing systems can be used, for example, to correct c.68C→A (P23H) mutation in the RHO gene. However, the PEgRNA disclosed in Table 4 are also capable of correcting any other mutations in the RHO gene that are found in the portion of the gene that shares homology or complementarity with the edit template/RTT.

[0276] The PEgRNAs exemplified in Table 4 comprise: (a) a spacer comprising at its 3′ end a sequence corresponding to sequence number 1187; (b) a gRNA core capable of complexing with a Cas9 protein, and (c) an extension arm comprising: (i) an editing template comprising at its 3′ end a sequence corresponding to any one of sequence numbers 1207-1211, and (ii) a prime binding site (PBS) comprising at its 5′ end a sequence corresponding to sequence number 1192. The PEgRNA spacer can be, for example, 17-22 nucleotides in length and can comprise the sequence corresponding to any one of sequence numbers 1187, 1188, 1189, 75, 1190, or 1191. In some embodiments, the PEgRNA spacer comprises sequence number 75. The PEgRNA spacers in Table 4 are annotated with their PAM sequence(s), enabling the selection of an appropriate Cas9 protein. The editing template can be referred to as a reverse transcription template (RTT). The editing template can encode wildtype RHO gene sequence. For example, the editing template can comprise at its 3′ end the sequence corresponding to sequence number 1208, 1212, 1216, 1220, 1224, 1228, 1232, 1236, 1240, 1244, 1248, 1252, 1256, 1260, 1264, 1268, 1272, 1276, or 1280. Alternatively, the editing template can encode one or more synonymous mutations relative to the wildtype RHO gene. The editing template can encode one or more synonymous mutations that are PAM silencing mutations and can comprise at its 3′ end the sequence corresponding to sequence number 1207, 1209, 1210, 1211, 1213, 1214, 1215, 1217, 1218, 1219, 1221, 1222, 1223, 1225, 1226, 1227, 1229, 1230, 1231, 1233, 1234, 1235, 1237, 1238, 1239, 1241, 1242, 1243, 1245, 1246, 1247, 1249, 1250, 1251, 1253, 1254, 1255, 1257, 1258, 1259, 1261, 1262, 1263, 1265, 1266, 1267, 1269, 1270, 1271, 1273, 1274, 1275, 1277, 1278, 1279, 1281, or 1282. The PBS can be, for example, 5 to 19 nucleotides in length and can comprise the sequence corresponding to any one of sequence numbers 1192-1206.

[0277] The PEgRNA can comprise, from 5′ to 3′, the spacer, the gRNA core, the edit template, and the PBS. The 3′ end of the edit template can be contiguous with the 5′ end of the PBS. The PEgRNA can comprise multiple RNA molecules or can be a single RNA molecule. Exemplary PEgRNAs provided in Table 4 can comprise a sequence corresponding to any one of sequence numbers 1286, 1287, 1288, 1289, 1290, 1291, 1292, 1293, 1294, 1295, 1296, 1297, 1298, 1299, 1300, 1301, 1302, 1303, 1304, 1305, 1306, 1307, 1308, 1309, 1310, 1311, 1312, 1313, 1314, 1315, 1316, 1317, 1318, 1319, 1320, 1321, 1322, 1323, 1324, 1325, 1326, 1327, 1328, or 1329. Any PEgRNA exemplified in Table 4 may comprise, or further comprise, a 3′ motif at the 3′ end of the extension arm, such as a universal motif, a sequence specific motif, or a series of 1, 2, 3, 4, 5, 6, 7 or more U nucleotides. In some embodiments, a universal or structural 3′ motif that is capable of forming a tertiary structure on its own such as a hairpin, a pseudoknot, or other RNA structure is used. In some embodiments, a sequence specific motif is used that is designed to hybridize with a portion of the RTT while not covering the PBS. Whether a universal or sequence specific motif is used, it can be connected to the 3′ of the PBS via a linker sequence. In some embodiments, the PEgRNA comprises 4 U nucleotides at its 3′ end. Without being bound by theory, such 3′ motifs are believed to increase PEgRNA stability. The PEgRNA may alternatively or additionally comprise one or more chemical modifications, such as phosphorothioate (PS) bond(s), 2′-O-methylated (2′-Ome) nucleotides, or a combination thereof. In some embodiments, the PEgRNA comprise 3′ mN*mN*mN*N and 5′ mN*mN*mN* modifications, where m indicates that the nucleotide contains a 2′-O-Me modification and a * indicates the presence of a phosphorothioate bond. PEgRNA sequences exemplified in Table 4 may alternatively be adapted for expression from a nucleic acid template with a U6 promoter, for example, by including a 5′ terminal G if the spacer of the PEgRNA begins with another nucleotide, by including 6 or 7 U nucleotides at the 3′ end of the extension arm, or both. Such transcription-adapted sequences may further comprise a universal or sequence specific motif between the PBS and the 3′ terminal U series. The modifications included in the selection of full length PEgRNAs included in Table 4 are annotated in column 3 of Table 4.

[0278] Any of the PEgRNAs of Table 4 can be used in a Prime Editing system further comprising a nick guide RNA (ngRNA). Such ngRNA can comprise a spacer comprising at its 3′ end a sequence corresponding to nucleotides 4-20 of any ngRNA spacer listed in Table 4 and a gRNA core capable of complexing with a Cas9 protein. For example, the sequence in the spacer of the ngRNA can comprise nucleotides 4-20, 3-20, 2-20, or 1-20 of sequence number 849, 850, 851, 520, 852, 853, 854, 1283, 862, 1284, 1285, 4, 855, 856, 857, or 858. In some embodiments, the spacer of the ngRNA is a ngRNA spacer listed in Table 4. The ngRNA spacers in Table 4 are annotated with their PAM sequences, enabling selection of an appropriate Cas9 protein. It can be advantageous to select a ngRNA spacer that has a PAM sequence compatible with the Cas9 protein used in the Prime Editor, thus avoiding the need to use two different Cas9 proteins. The ngRNA is capable of directing a complexed Cas9 protein to bind the edit strand of the RHO gene; thus, a complexed Cas9 nickase containing a nuclease inactivating mutation in the HNH domain will nick the non-edit strand. A PE3 ngRNA spacer has perfect complementarity to the edit strand both pre- and post-edit; a PE3b ngRNA spacer has perfect complementarity to the edit strand post-edit. A PE3 or PE3b ngRNA spacer in Table 4 annotated with the same * and number code as an RTT in Table 4 has perfect complementarity to the edit strand post-edit by a PEgRNA containing the RTT. Exemplary ngRNA provided in Table 4 can comprise a sequence corresponding to sequence number 1157, 1161, 1162, 1163, 1164, 1165, 1166, 1167, 1168, 1169, 1170, 1171, 1175, 1176, 1177, 1178, 1179, 1180, 1181, 1182, 1183, 1184, or 1186.

[0279] Table 5 provides Prime Editing guide RNAs (PEgRNAs) that can be used with any Prime Editor containing a Cas9 protein capable of recognizing a TGG PAM sequence. The PEgRNAs of Table 5 can also be used in Prime Editing systems further comprising a nick guide RNA (ngRNA). Such PEgRNAs and Prime Editing systems can be used, for example, to correct c.68C→A (P23H) mutation in the RHO gene. However, the PEgRNA disclosed in Table 5 are also capable of correcting any other mutations in the RHO gene that are found in the portion of the gene that shares homology or complementarity with the edit template/RTT.

[0280] The PEgRNAs exemplified in Table 5 comprise: (a) a spacer comprising at its 3′ end a sequence corresponding to sequence number 1330; (b) a gRNA core capable of complexing with a Cas9 protein, and (c) an extension arm comprising: (i) an editing template comprising at its 3′ end a sequence corresponding to sequence number 1350, and (ii) a prime binding site (PBS) comprising at its 5′ end a sequence corresponding to sequence number 1335. The PEgRNA spacer can be, for example, 17-22 nucleotides in length and can comprise the sequence corresponding to any one of sequence numbers 1330, 1331, 1332, 855, 1333, or 1334. In some embodiments, the PEgRNA spacer comprises sequence number 855. The PEgRNA spacers in Table 5 are annotated with their PAM sequence(s), enabling the selection of an appropriate Cas9 protein. The editing template can be referred to as a reverse transcription template (RTT). The editing template can encode wildtype RHO gene sequence. For example, the editing template can comprise at its 3′ end the sequence corresponding to sequence number 1350, 1351, 1352, 1353, 1354, 1355, 1356, 1357, 1358, 1359, 1360, 1361, 1362, 1363, 1364, 1365, 1366, 1367, 1368, 1369, 1370, 1371, 1372, or 1373. Alternatively, the editing template can encode one or more synonymous mutations relative to the wildtype RHO gene. The PBS can be, for example, 5 to 19 nucleotides in length and can comprise the sequence corresponding to any one of sequence numbers 1335-1349.

[0281] The PEgRNA can comprise, from 5′ to 3′, the spacer, the gRNA core, the edit template, and the PBS. The 3′ end of the edit template can be contiguous with the 5′ end of the PBS. The PEgRNA can comprise multiple RNA molecules or can be a single RNA molecule. Exemplary PEgRNAs provided in Table 5 can comprise a sequence corresponding to any one of sequence numbers 1374, 1375, 1376, 1377, 1378, 1379, 1380, 1381, 1382, 1383, 1384, 1385, 1386, 1387, 1388, 1389, 1390, 1391, 1392, 1393, 1394, 1395, 1396, 1397, 1398, 1399, 1400, 1401, 1402, 1403, 1404, 1405, 1406, 1407, 1408, 1409, 1410, 1411, 1412, 1413, 1414, 1415, 1416, 1417, 1418, 1419, 1420, 1421, 1422, 1423, 1424, 1425, 1426, 1427, 1428, 1429, 1430, 1431, 1432, 1433, 1434, or 1435. Any PEgRNA exemplified in Table 5 may comprise, or further comprise, a 3′ motif at the 3′ end of the extension arm, such as a universal motif, a sequence specific motif, or a series of 1, 2, 3, 4, 5, 6, 7 or more U nucleotides. In some embodiments, a universal or structural 3′ motif that is capable of forming a tertiary structure on its own such as a hairpin, a pseudoknot, or other RNA structure is used. In some embodiments, a sequence specific motif is used that is designed to hybridize with a portion of the RTT while not covering the PBS. Whether a universal or sequence specific motif is used, it can be connected to the 3′ of the PBS via a linker sequence. In some embodiments, the PEgRNA comprises 4 U nucleotides at its 3′ end. Without being bound by theory, such 3′ motifs are believed to increase PEgRNA stability. The PEgRNA may alternatively or additionally comprise one or more chemical modifications, such as phosphorothioate (PS) bond(s), 2′-O-methylated (2′-Ome) nucleotides, or a combination thereof. In some embodiments, the PEgRNA comprise 3′ mN*mN*mN*N and 5′ mN*mN*mN* modifications, where m indicates that the nucleotide contains a 2′-O-Me modification and a * indicates the presence of a phosphorothioate bond. PEgRNA sequences exemplified in Table 5 may alternatively be adapted for expression from a nucleic acid template with a U6 promoter, for example, by including a 5′ terminal G if the spacer of the PEgRNA begins with another nucleotide, by including 6 or 7 U nucleotides at the 3′ end of the extension arm, or both. Such transcription-adapted sequences may further comprise a universal or sequence specific motif between the PBS and the 3′ terminal U series. The modifications included in the selection of full length PEgRNAs included in Table 5 are annotated in column 3 of Table 5.

[0282] Any of the PEgRNAs of Table 5 can be used in a Prime Editing system further comprising a nick guide RNA (ngRNA). Such ngRNA can comprise a spacer comprising at its 3′ end a sequence corresponding to nucleotides 4-20 of any ngRNA spacer listed in Table 5 and a gRNA core capable of complexing with a Cas9 protein. For example, the sequence in the spacer of the ngRNA can comprise nucleotides 4-20, 3-20, 2-20, or 1-20 of sequence number 72, 73, 74, 75, 76, 77, 78, 79, or 80. In some embodiments, the spacer of the ngRNA is a ngRNA spacer listed in Table 5. The ngRNA spacers in Table 5 are annotated with their PAM sequences, enabling selection of an appropriate Cas9 protein. It can be advantageous to select a ngRNA spacer that has a PAM sequence compatible with the Cas9 protein used in the Prime Editor, thus avoiding the need to use two different Cas9 proteins. The ngRNA is capable of directing a complexed Cas9 protein to bind the edit strand of the RHO gene; thus, a complexed Cas9 nickase containing a nuclease inactivating mutation in the HNH domain will nick the non-edit strand. A PE3 ngRNA spacer has perfect complementarity to the edit strand both pre- and post-edit; a PE3b ngRNA spacer has perfect complementarity to the edit strand post-edit. A PE3 or PE3b ngRNA spacer in Table 5 annotated with the same * and number code as an RTT in Table 5 has perfect complementarity to the edit strand post-edit by a PEgRNA containing the RTT. Exemplary ngRNA provided in Table 5 can comprise a sequence corresponding to sequence number 496, 497, 498, 499, 500, 501, 502, 503, 507, 508, 509, 510, 511, 512, 513, 514, or 515.

[0283] Table 6 provides Prime Editing guide RNAs (PEgRNAs) that can be used with any Prime Editor containing a Cas9 protein capable of recognizing a GGG PAM sequence. The PEgRNAs of Table 6 can also be used in Prime Editing systems further comprising a nick guide RNA (ngRNA). Such PEgRNAs and Prime Editing systems can be used, for example, to correct c.68C→A (P23H) mutation in the RHO gene. However, the PEgRNA disclosed in Table 6 are also capable of correcting any other mutations in the RHO gene that are found in the portion of the gene that shares homology or complementarity with the edit template/RTT.

[0284] The PEgRNAs exemplified in Table 6 comprise: (a) a spacer comprising at its 3′ end a sequence corresponding to sequence number 1436; (b) a gRNA core capable of complexing with a Cas9 protein, and (c) an extension arm comprising: (i) an editing template comprising at its 3′ end a sequence corresponding to any one of sequence numbers 1456, and (ii) a prime binding site (PBS) comprising at its 5′ end a sequence corresponding to sequence number 1441. The PEgRNA spacer can be, for example, 17-22 nucleotides in length and can comprise the sequence corresponding to any one of sequence numbers 1436, 1437, 1438, 78, 1439, 1440. In some embodiments, the PEgRNA spacer comprises sequence number 78. The PEgRNA spacers in Table 6 are annotated with their PAM sequence(s), enabling the selection of an appropriate Cas9 protein. The editing template can be referred to as a reverse transcription template (RTT). The editing template can encode wildtype RHO gene sequence. For example, the editing template can comprise at its 3′ end the sequence corresponding to sequence number 1456, 1457, 1458, 1459, 1460, 1461, 1462, 1463, 1464, 1465, 1466, 1467, 1468, 1469, 1470, 1471, 1472, 1473, 1474, or 1475. Alternatively, the editing template can encode one or more synonymous mutations relative to the wildtype RHO gene. The PBS can be, for example, 5 to 19 nucleotides in length and can comprise the sequence corresponding to any one of sequence numbers 1441-1455.

[0285] The PEgRNA can comprise, from 5′ to 3′, the spacer, the gRNA core, the edit template, and the PBS. The 3′ end of the edit template can be contiguous with the 5′ end of the PBS. The PEgRNA can comprise multiple RNA molecules or can be a single RNA molecule. Exemplary PEgRNAs provided in Table 6 can comprise a sequence corresponding to any one of sequence numbers 1476, 1477, 1478, 1479, 1480, 1481, 1482, 1483, 1484, 1485, 1486, 1487, 1488, 1489, 1490, 1491, 1492, 1493, 1494, 1495, 1496, 1497, 1498, 1499, 1500, 1501, 1502, 1503, 1504, 1505, 1506, 1507, 1508, 1509, 1510, 1511, 1512, 1513, 1514, or 1515. Any PEgRNA exemplified in Table 6 may comprise, or further comprise, a 3′ motif at the 3′ end of the extension arm, such as a universal motif, a sequence specific motif, or a series of 1, 2, 3, 4, 5, 6, 7 or more U nucleotides. In some embodiments, a universal or structural 3′ motif that is capable of forming a tertiary structure on its own such as a hairpin, a pseudoknot, or other RNA structure is used. In some embodiments, a sequence specific motif is used that is designed to hybridize with a portion of the RTT while not covering the PBS. Whether a universal or sequence specific motif is used, it can be connected to the 3′ of the PBS via a linker sequence. In some embodiments, the PEgRNA comprises 4 U nucleotides at its 3′ end. Without being bound by theory, such 3′ motifs are believed to increase PEgRNA stability. The PEgRNA may alternatively or additionally comprise one or more chemical modifications, such as phosphorothioate (PS) bond(s), 2′-O-methylated (2′-Ome) nucleotides, or a combination thereof. In some embodiments, the PEgRNA comprise 3′ mN*mN*mN*N and 5′ mN*mN*mN* modifications, where m indicates that the nucleotide contains a 2′-O-Me modification and a * indicates the presence of a phosphorothioate bond. PEgRNA sequences exemplified in Table 6 may alternatively be adapted for expression from a nucleic acid template with a U6 promoter, for example, by including a 5′ terminal G if the spacer of the PEgRNA begins with another nucleotide, by including 6 or 7 U nucleotides at the 3′ end of the extension arm, or both. Such transcription-adapted sequences may further comprise a universal or sequence specific motif between the PBS and the 3′ terminal U series. The modifications included in the selection of full length PEgRNAs included in Table 6 are annotated in column 3 of Table 6.

[0286] Any of the PEgRNAs of Table 6 can be used in a Prime Editing system further comprising a nick guide RNA (ngRNA). Such ngRNA can comprise a spacer comprising at its 3′ end a sequence corresponding to nucleotides 4-20 of any ngRNA spacer listed in Table 6 and a gRNA core capable of complexing with a Cas9 protein. For example, the sequence in the spacer of the ngRNA can comprise nucleotides 4-20, 3-20, 2-20, or 1-20 of sequence number 849, 850, 851, 520, 852, 853, 854, 4, 855, 856, 857, or 858. In some embodiments, the spacer of the ngRNA is a ngRNA spacer listed in Table 6. The ngRNA spacers in Table 6 are annotated with their PAM sequences, enabling selection of an appropriate Cas9 protein. It can be advantageous to select a ngRNA spacer that has a PAM sequence compatible with the Cas9 protein used in the Prime Editor, thus avoiding the need to use two different Cas9 proteins. The ngRNA is capable of directing a complexed Cas9 protein to bind the edit strand of the RHO gene; thus, a complexed Cas9 nickase containing a nuclease inactivating mutation in the HNH domain will nick the non-edit strand. A PE3 ngRNA spacer has perfect complementarity to the edit strand both pre- and post-edit; a PE3b ngRNA spacer has perfect complementarity to the edit strand post-edit. A PE3 or PE3b ngRNA spacer in Table 6 annotated with the same * and number code as an RTT in Table 6 has perfect complementarity to the edit strand post-edit by a PEgRNA containing the RTT. Exemplary ngRNA provided in Table 6 can comprise a sequence corresponding to sequence number 1161, 1162, 1163, 1164, 1165, 1166, 1167, 1168, 1169, 1170, 1175, 1176, 1177, 1178, 1179, 1180, 1181, 1182, 1183, 1184, or 1186.

[0287] Table 7 provides Prime Editing guide RNAs (PEgRNAs) that can be used with any Prime Editor containing a Cas9 protein capable of recognizing an AGG PAM sequence. The PEgRNAs of Table 7 can also be used in Prime Editing systems further comprising a nick guide RNA (ngRNA). Such PEgRNAs and Prime Editing systems can be used, for example, to correct c.68C→A (P23H) mutation in the RHO gene. However, the PEgRNA disclosed in Table 7 are also capable of correcting any other mutations in the RHO gene that are found in the portion of the gene that shares homology or complementarity with the edit template/RTT.

[0288] The PEgRNAs exemplified in Table 7 comprise: (a) a spacer comprising at its 3′ end a sequence corresponding to sequence number 1516; (b) a gRNA core capable of complexing with a Cas9 protein, and (c) an extension arm comprising: (i) an editing template comprising at its 3′ end a sequence corresponding to any one of sequence numbers 1536-1541, and (ii) a prime binding site (PBS) comprising at its 5′ end a sequence corresponding to sequence number 1521. The PEgRNA spacer can be, for example, 17-22 nucleotides in length and can comprise the sequence corresponding to any one of sequence numbers 1516, 1517, 1518, 850, 1519, or 1520. In some embodiments, the PEgRNA spacer comprises sequence number 850. The PEgRNA spacers in Table 7 are annotated with their PAM sequence(s), enabling the selection of an appropriate Cas9 protein. The editing template can be referred to as a reverse transcription template (RTT). The editing template can encode wildtype RHO gene sequence. For example, the editing template can comprise at its 3′ end the sequence corresponding to sequence number 1536, 1542, 1548, 1554, 1560, 1566, 1572, 1578, 1584, 1590, 1596, 1602, or 1608. Alternatively, the editing template can encode one or more synonymous mutations relative to the wildtype RHO gene. The editing template can encode one or more synonymous mutations that are PAM silencing mutations and can comprise at its 3′ end the sequence corresponding to sequence number 1538, 1539, 1541, 1544, 1545, 1547, 1550, 1551, 1553, 1556, 1557, 1559, 1562, 1563, 1565, 1568, 1569, 1571, 1574, 1575, 1577, 1580, 1581, 1583, 1586, 1587, 1589, 1592, 1593, 1595, 1598, 1599, 1601, 1604, 1605, 1607, 1610, 1611, or 1613. The PBS can be, for example, 5 to 19 nucleotides in length and can comprise the sequence corresponding to any one of sequence numbers 1521-1535.

[0289] The PEgRNA can comprise, from 5′ to 3′, the spacer, the gRNA core, the edit template, and the PBS. The 3′ end of the edit template can be contiguous with the 5′ end of the PBS. The PEgRNA can comprise multiple RNA molecules or can be a single RNA molecule. Exemplary PEgRNAs provided in Table 7 can comprise a sequence corresponding to any one of sequence numbers 1617, 1618, 1619, 1620, 1621, 1622, 1623, 1624, 1625, 1626, 1627, 1628, 1629, 1630, 1631, 1632, 1633, 1634, 1635, 1636, 1637, 1638, 1639, 1640, 1641, 1642, 1643, 1644, 1645, or 1646. Any PEgRNA exemplified in Table 7 may comprise, or further comprise, a 3′ motif at the 3′ end of the extension arm, such as a universal motif, a sequence specific motif, or a series of 1, 2, 3, 4, 5, 6, 7 or more U nucleotides. In some embodiments, a universal or structural 3′ motif that is capable of forming a tertiary structure on its own such as a hairpin, a pseudoknot, or other RNA structure is used. In some embodiments, a sequence specific motif is used that is designed to hybridize with a portion of the RTT while not covering the PBS. Whether a universal or sequence specific motif is used, it can be connected to the 3′ of the PBS via a linker sequence. In some embodiments, the PEgRNA comprises 4 U nucleotides at its 3′ end. Without being bound by theory, such 3′ motifs are believed to increase PEgRNA stability. The PEgRNA may alternatively or additionally comprise one or more chemical modifications, such as phosphorothioate (PS) bond(s), 2′-O-methylated (2′-Ome) nucleotides, or a combination thereof. In some embodiments, the PEgRNA comprise 3′ mN*mN*mN*N and 5′ mN*mN*mN* modifications, where m indicates that the nucleotide contains a 2′-O-Me modification and a * indicates the presence of a phosphorothioate bond. PEgRNA sequences exemplified in Table 7 may alternatively be adapted for expression from a nucleic acid template with a U6 promoter, for example, by including a 5′ terminal G if the spacer of the PEgRNA begins with another nucleotide, by including 6 or 7 U nucleotides at the 3′ end of the extension arm, or both. Such transcription-adapted sequences may further comprise a universal or sequence specific motif between the PBS and the 3′ terminal U series. The modifications included in the selection of full length PEgRNAs included in Table 7 are annotated in column 3 of Table 7.

[0290] Any of the PEgRNAs of Table 7 can be used in a Prime Editing system further comprising a nick guide RNA (ngRNA). Such ngRNA can comprise a spacer comprising at its 3′ end a sequence corresponding to nucleotides 4-20 of any ngRNA spacer listed in Table 7 and a gRNA core capable of complexing with a Cas9 protein. For example, the sequence in the spacer of the ngRNA can comprise nucleotides 4-20, 3-20, 2-20, or 1-20 of sequence number 72, 73, 74, 82, 1614, 1615, 1616, 75, 76, 77, or 78. In some embodiments, the spacer of the ngRNA is a ngRNA spacer listed in Table 7. The ngRNA spacers in Table 7 are annotated with their PAM sequences, enabling selection of an appropriate Cas9 protein. It can be advantageous to select a ngRNA spacer that has a PAM sequence compatible with the Cas9 protein used in the Prime Editor, thus avoiding the need to use two different Cas9 proteins. The ngRNA is capable of directing a complexed Cas9 protein to bind the edit strand of the RHO gene; thus, a complexed Cas9 nickase containing a nuclease inactivating mutation in the HNH domain will nick the non-edit strand. A PE3 ngRNA spacer has perfect complementarity to the edit strand both pre- and post-edit; a PE3b ngRNA spacer has perfect complementarity to the edit strand post-edit. A PE3 or PE3b ngRNA spacer in Table 7 annotated with the same * and number code as an RTT in Table 7 has perfect complementarity to the edit strand post-edit by a PEgRNA containing the RTT. Exemplary ngRNA provided in Table 7 can comprise a sequence corresponding to sequence number 494, 496, 497, 498, 499, 500, 501, 502, 503, 504, 505, 507, 508, 509, 510, 511, 512, 513, 514, 515, or 516.

[0291] A ngRNA protospacer may be in close proximity to the PEgRNA spacer, or may be upstream or downstream of the PEgRNA spacer. In some embodiments, the distance generated by the PEgRNA nick site and the ngRNA nick site (referred to as the nick-to-nick distance) is about 3 to about 100 nucleotides. In some embodiments, the distance generated by the PEgRNA nick site and the ngRNA nick site (referred to as the nick-to-nick distance) is about 4-90, 4-80, 4-70, 4-60, 4-50, 4-40, 4-30, 4-20, or 4-10 nucleotides. In some embodiments, the distance generated by the PEgRNA nick site and the ngRNA nick site (referred to as the nick-to-nick distance) is about 10-20, 20-30, 30-40, 40-50, 50-60, 60-70, 70-80, 80-90, or 90-100 nucleotides. In some embodiments, the nick-to-nick distance is about 4-88 nucleotides. In some embodiments, the nick-to-nick distance is about 4-72 nucleotides. In some embodiments, the nick-to-nick distance is about 4-61 nucleotides. In some embodiments, the nick-to-nick distance is about 61-72 nucleotides. In some embodiments, the nick-to-nick distance is about 61-88 nucleotides. In some embodiments, the nick-to-nick distance is about 72-88 nucleotides. In some embodiments, the nick-to-nick distance is about 4-7 nucleotides. In some embodiments, the nick-to-nick distance is 4, 5, 6, or 7 nucleotides. In some embodiments, the nick-to-nick distance is about 41-96 nucleotides. In some embodiments, the nick-to-nick distance is about 41-82 nucleotides. In some embodiments, the nick-to-nick distance is about 41-44 nucleotides. In some embodiments, the nick-to-nick distance is about 44-82 nucleotides. In some embodiments, the nick-to-nick distance is about 44-96 nucleotides. In some embodiments, the nick-to-nick distance is about 82-96 nucleotides. In some embodiments, the nick-to-nick distance is 41, 44, 82, or 96 nucleotides. In some embodiments, the intended nucleotide edit is incorporated within about 1-10 nucleotides of the position corresponding to the PAM of the ng search target sequence.

[0292] The gRNA core of a PEgRNA or ngRNA can be any gRNA scaffold sequence that is capable of interacting with a Cas protein that recognizes the corresponding PAM of the PEgRNA or ngRNA. In some embodiments, gRNA core of a PEgRNA or a ngRNA comprises a nucleic acid sequence selected from SEQ ID Nos: 1854-1859.

[0293] In some embodiments, a PEgRNA (or ngRNA) comprises an additional secondary structure at the 5′ end. In some embodiments, a PEgRNA (or ngRNA) comprises an additional secondary structure at the 3′ end.

[0294] In some embodiments, the secondary structure comprises a pseudoknot. In some embodiments, the secondary structure comprises a pseudoknot derived from a virus. In some embodiments, the secondary structure comprises a pseudoknot of a Moloney murine leukemia virus (M-MLV) genome (a mpknot). In some embodiments, the secondary structure comprises a nucleotide sequence selected from the group consisting of GGGUCAGGAGCCCCCCCCCUGAACCCAGGAUAACCCUCAAAGUCGGGGGGCAACC (SEQ ID No: 1937), GUCAGGGUCAGGAGCCCCCCCCCUGAACCCAGGAUAACCCUCAAAGUCGGGGGGCAAC CC (SEQ ID No: 1938), GGGUCAGGAGCCCCCCCCCUGAACCCAGGAAAACCCUCAAAGUCGGGGGGCAACCC (SEQ ID No: 1939), GGGUCAGGAGCCCCCCCCCUGCACCCAGGAAAACCCUCAAAGUCGGGGGGCAACCC (SEQ ID No: 1940), GGGUCAGGAGCCCCCCCCCUGCACCCAGGAUAACCCUCAAAGUCGGGGGGCAACCC (SEQ ID No: 1941), GUCAGGGUCAGGAGCCCCCCCCCUGAACCCAGGAAAACCCUCAAAGUCGGGGGGCAAC CC (SEQ ID No: 1942), GUCAGGGUCAGGAGCCCCCCCCCUGCACCCAGGAAAACCCUCAAAGUCGGGGGGCAAC CC (SEQ ID No: 1943), and GGGUCAGGAGCCCCCCCCCUGAACCCAGGAUAACCCUCAAAGUCGGGGGGC (SEQ ID No: 1944), or a nucleotide sequence having at least 80%, 85%, 90%, 95%, 96%, 97%, 98%, or 99% sequence identity therewith. In some embodiments, the secondary structure comprises a nucleotide sequence of GGGUCAGGAGCCCCCCCCCUGAACCCAGGAUAACCCUCAAAGUCGGGGGGC (SEQ ID No: 1944), or a nucleotide sequence having at least 80%, 85%, 90%, 95%, 96%, 97%, 98%, or 99% sequence identity therewith.

[0295] In some embodiments, the secondary structure comprises a quadruplex. In some embodiments, the secondary structure comprises a G-quadruplex. In some embodiments, the secondary structure comprises a nucleotide sequence selected from the group consisting of gq2 (UGGUGGUGGUGGU) (SEQ ID No: 1945), stk40 (GGGACAGGGCAGGGACAGGG) (SEQ ID No: 1946), apc2 (GGGUCCGGGUCUGGGUCUGGG) (SEQ ID No: 1947), stard3 (GGGCAGGGUCUGGGCUGGG) (SEQ ID No: 1948), tns1(GGGCUGGGAUGGGAAAGGG) (SEQ ID No: 1949), ceacam4 (GGGCUCUGGGUGGGCCGGG) (SEQ ID No: 1950), erc1 (GGGCUGGGCUGGGCAGGG) (SEQ ID No: 1951), pitpnm3(GGGUGGGCUGGGAAGGG) (SEQ ID No: 1952), rlf (GGGAGGGAGGGCUAGGG) (SEQ ID No: 1953), ube3c(GGGCAGGGCUGGGAGGG) (SEQ ID No: 1954), taf15(GGGUGGGAGGGCUGGG) (SEQ ID No: 1955), and xrn1 (GCGUAACCUCCAUCCGAGUUGCAAGAGAGGGAAACGCAGUCUC) (SEQ ID No: 1956), or a nucleotide sequence having at least 80%, 85%, 90%, 95%, 96%, 97%, 98%, or 99% sequence identity therewith.

[0296] In some embodiments, the secondary structure comprises a P4-P6 domain of a Group I intron. In some embodiments, the secondary structure comprises the nucleotide sequence of GGAAUUGCGGGAAAGGGGUCAACAGCCGUUCAGUACCAAGUCUCAGGGGAAACUUUG AGAUGGCCUUGCAAAGGGUAUGGUAAUAAGCUGACGGACAUGGUCCUAACCACGCAG CCAAGUCCUAAGUCAACAGAUCUUCUGUUGAUAUGGAUGCAGUUCA (SEQ ID No: 1957), or a nucleotide sequence having at least 80%, 85%, 90%, 95%, 96%, 97%, 98%, or 99% sequence identity therewith.

[0297] In some embodiments, the secondary structure comprises a riboswitch aptamer. In some embodiments, the secondary structure comprises a riboswitch aptamer derived from a prequeosine-1 riboswitch aptamer. In some embodiments, the secondary structure comprises a modified prequeosine-1 riboswitch aptamer. In some embodiments, the secondary structure comprises a nucleotide sequence selected from the group consisting of: UUGACGCGGUUCUAUCUAGUUACGCGUUAAACCAACUAGAAA (SEQ ID No: 1958), UUGACGCGGUUCUAUCUACUUACGCGUUAAACCAACUAGAAA (SEQ ID No: 1959), CGCGAGUCUAGGGGAUAACGCGUUAAACUUCCUAGAAGGCGGUU (SEQ ID No: 1960), CGCGGAUCUAGAUUGUAACGCGUUAAACCAUCUAGAAGGCGGUU (SEQ ID No: 1961), CGCGUCGCUACCGCCCGGCGCGUUAAACACACUAGAAGGCGGUU (SEQ ID No: 1962), and CGCGGUUCUAUCUAGUUACGCGUUAAACCAACUAGAA (SEQ ID No: 1963), or a nucleotide sequence having at least 80%, 85%, 90%, 95%, 96%, 97%, 98%, or 99% sequence identity therewith. In some embodiments, the secondary structure comprises a nucleotide sequence selected from the group consisting of UUGACGCGGUUCUAUCUAGUUACGCGUUAAACCAACUAGAAA (SEQ ID No: 1958), CGCGAGUCUAGGGGAUAACGCGUUAAACUUCCUAGAAGGCGGUU (SEQ ID No: 1960), CGCGGAUCUAGAUUGUAACGCGUUAAACCAUCUAGAAGGCGGUU (SEQ ID No: 1961), CGCGUCGCUACCGCCCGGCGCGUUAAACACACUAGAAGGCGGUU (SEQ ID No: 1962), and CGCGGUUCUAUCUAGUUACGCGUUAAACCAACUAGAA (SEQ ID No: 1963), or a nucleotide sequence having at least 80%, 85%, 90%, 95%, 96%, 97%, 98%, or 99% sequence identity therewith. In some embodiments, the secondary structure comprises a nucleotide sequence of and CGCGGUUCUAUCUAGUUACGCGUUAAACCAACUAGAA (SEQ ID No: 1963), or a nucleotide sequence having at least 80%, 85%, 90%, 95%, 96%, 97%, 98%, or 99% sequence identity therewith.

[0298] In some embodiments, the PEgRNA comprises a RNA secondary structure and/or a linker disclosed in Nelson et al. Engineered pegRNAs improve prime editing efficiency. Nat Biotechnol. (2021), the entirety of which is incorporated herein by reference.

[0299] In some embodiments, a PEgRNA is transcribed from a nucleotide encoding the PEgRNA, for example, a DNA plasmid encoding the PEgRNA. In some embodiments, the PEgRNA comprises a self-cleaving element. In some embodiments, the self-cleaving element improves transcription and/or processing of the PEgRNA when transcribed form the nucleotide encoding the PEgRNA. In some embodiments, the PEgRNA comprises a hairpin or a RNA quadruplex. In some embodiments, the PEgRNA comprises a self-cleaving ribozyme element, for example, a hammerhead, a pistol, a hatchet, a hairpin, a VS, a twister, or a twister sister ribozyme. In some embodiments, the PEgRNA comprises a HDV ribozyme. In some embodiments, the PEgRNA comprises a hairpin recognized by Csy4. In some embodiments, the PEgRNA comprises an ENE motif. In some embodiments, the PEgRNA comprises an element for nuclear expression (ENE) from MALAT1 Inc RNA. In some embodiments, the PEgRNA comprises an ENE element from Kaposi's sarcoma-associated herpesvirus (KSHV). In some embodiments, the PEgRNA comprises a 3′ box of a U1 snRNA. In some embodiments, the PEgRNA forms a circular RNA.

[0300] In some embodiments, the PEgRNA comprises a RNA secondary structure or a motif that improves binding to the DNA-RNA duple or enhances PEgRNA activity. In some embodiments, the PEgRNA comprises a sequence derived from a native nucleotide element involved in reverse transcription, e.g., initiation of retroviral transcription. In some embodiments, the PEgRNA comprises a sequence of, or derived from, a primer binding site of a substrate of a reverse transcriptase, a polypurine tract (PPT), or a kissing loop. In some embodiments, the PEgRNA comprises a dimerization motif, a kissing loop, or a GNRA tetraloop—tetraloop receptor pair that results in circularization of the PEgRNA. In some embodiments, the PEgRNA comprises a RNA secondary structure of a motif that results in physical separation of the spacer and the PBS of the PEgRNA, thereby prevents occlusion of the spacer and improves PEgRNA activity. In some embodiments, the PEgRNA comprises a secondary structure or motif, e.g., a 5′ or 3′ extension in the spacer region that form a toehold or hairpin, wherein the secondary structure or motif competes favorably against annealing between the spacer and the PBS of the PEgRNA, thereby prevents occlusion of the spacer and improves PEgRNA activity.

[0301] In some embodiments, a PEgRNA comprises the sequence GGCCGGCAUGGUCCCAGCCUCCUCGCUGGCGCCGGCUGGGCAACAUGCUUCGGCAUGGC GAAUGGGAC (SEQ ID No: 1964) at the 3′ end. In some embodiments, a PEgRNA comprises the structure [spacer]-[gRNA core]-[editing template]-[PBS]-GGCCGGCAUGGUCCCAGCCUCCUCGCUGGCGCCGGCUGGGCAACAUGCUUCGGCAUGGC GAAUGGGAC (SEQ ID NO: 1964), or [spacer]-[gRNA core]-[editing template]-[PBS]-GGCCGGCAUGGUCCCAGCCUCCUCGCUGGCGCCGGCUGGGCAACAUGCUUCGGCAUGGC GAAUGGGAC-(U)n (SEQ ID NO: 1976), wherein n is an integer between 3 and 7. The structure derived from hepatitis D virus (HDV) is italicized.

[0302] In some embodiments, the PEgRNA comprises the sequence GGUGGGAGACGUCCCACC (SEQ ID No: 1965) at the 5′ end and/or the sequence UGGGAGACGUCCCACC (SEQ ID NO: 1977) at the 3′ end. In some embodiments, the PEgRNA comprises the following structure (M-MLV kissing loop): GGUGGGAGACGUCCCACC (SEQ ID NO: 1965)-[spacer]-[gRNA core]-[editing template]-[PBS]-UGGGAGACGUCCCACC (SEQ ID NO: 1977), or GGUGGGAGACGUCCCACC (SEQ ID NO: 1965)-[spacer]-[gRNA core]-[editing template]-[PBS]-UGGGAGACGUCCCACC-(U)n (SEQ ID NO: 1978), wherein n is an integer between 3 and 7. The kissing loop structure is italicized.

[0303] In some embodiments, the PEgRNA comprises the sequence GAGCAGCAUGGCGUCGCUGCUCAC (SEQ ID No: 1966) at the 5′ end and/or the sequence CCAUCAGUUGACACCCUGAGG (SEQ ID No: 1967) at the 3′ end. In some embodiments, the PEgRNA comprises the following structure (VS ribozyme kissing loop):

[0304] GAGCAGCAUGGCGUCGCUGCUCAC (SEQ ID NO: 1966)-[spacer]-[gRNA core]-[editing template]-[PBS]-CCAUCAGUUGACACCCUGAGG (SEQ ID NO: 1967), or GAGCAGCAUGGCGUCGCUGCUCAC (SEQ ID NO: 1966)-[spacer]-[gRNA core]-[editing template]-[PBS]-CCAUCAGUUGACACCCUGAGG-(U)n (SEQ ID NO: 1979), wherein n is an integer between 3 and 7. (VS ribozyme kissing loop):

[0305] In some embodiments, the PEgRNA comprises the sequence GCAGACCUAAGUGGUGACAUAUGGUCUG (SEQ ID No: 1968) at the 5′ end and/or the sequence CAUGCGAUUAGAAAUAAUCGCAUG (SEQ ID No: 1969) at the 3′ end. In some embodiments, the PEgRNA comprises the following structure (tetraloop and receptor): GCAGACCUAAGUGGUGACAUAUGGUCUG (SEQ ID NO: 1968)-[spacer]-[gRNA core]-[editing template]-[PBS]-CAUGCGAUUAGAAAUAAUCGCAUG (SEQ ID NO: 1969), or GCAGACCUAAGUGGUGACAUAUGGUCUG (SEQ ID NO: 1968)-[spacer]-[gRNA core]-[editing template]-[PBS]-CAUGCGAUUAGAAAUAAUCGCAUG-(U)n (SEQ ID NO: 1980), wherein n is an integer between 3 and 7. The tetraloop/tetraloop receptor structure is italicized.

[0306] In some embodiments, the PEgRNA comprises the sequence GGCCGGCAUGGUCCCAGCCUCCUCGCUGGCGCCGGCUGGGCAACAUGCUUCGGCAUGG CGAAUGGGAC (SEQ ID No: 1964) or UCUGCCAUCAAAGCUGCGACCGUGCUCAGUCUGGUGGGAGACGUCCCACCGGCCGGCA UGGUCCCAGCCUCCUCGCUGGCGCCGGCUGGGCAACAUGCUUCGGCAUGGCGAAUGGG AC (SEQ ID No: 1970).

[0307] In some embodiments, a PEgRNA comprises a gRNA core that comprises a modified direct repeat compared to the sequence of a naturally occurring CRISPR-Cas guide RNA scaffold, for example, a Cas9 gRNA scaffold. In some embodiments, the PEgRNA comprises a “flip and extension (F+E)” gRNA core, wherein one or more base pairs in a direct repeat is modified. In some embodiments, the PEgRNA comprises a first direct repeat (the first paring element or the lower stem), wherein a Uracil is changed to a Adenine (such that in the stem region, a U-A base pair is changed to a A-U base pair). In some embodiments, the PEgRNA comprises a first direct repeat wherein the fourth U-A base pair in the stem is changed to a A-U base pair. In some embodiments, the PEgRNA comprises a first direct repeat wherein one or more U-A base pair is changed to a G-C or C-G base pair. For example, in some embodiments, the PEgRNA comprises a first direct repeat comprising a modification to a GUUUU-AAAAC pairing element, wherein one or more of the U-A base pairs is changed to a A-U base pair, a G-C base pair, or a C-G base pair. In some embodiments, the PEgRNA comprises an extended first direct repeat.

[0308] In some embodiments, a PEgRNA comprises a gRNA core comprises the sequence GUUUUAGAGCUAUACGUAGCAAGUUAAAAUAAGGCUAGUCCGUUAUCAACUUUACGA AGUGGCACCGAGUCGGUGC (SEQ ID No: 1971) or GUUUUAGAGCUAUACGUAGCAAGUUAAAAUAAGGCUAGUCCGUUAUCAACUUUACGA AGUGGGACCGAGUCGGUCC (SEQ ID No: 1972).

[0309] In some embodiments, a PEgRNA comprises a gRNA core comprising the sequence GUUUUAGAGCUAGCUCAUGAAAAUGAGCUAGCAAGUUAAAAUAAGGCUAGUCCGUUA UCAACUUGAAAAAGUGGGACCGAGUCGGUCC (SEQ ID No: 1973).

[0310] In some embodiments, a PEgRNA comprises a gRNA core comprising the sequence GUUUGAGAGCUAGAAAUAGCAAGUUUAAAUAAGGCUAGUCCGUUAUCAACUUGAAAA AGUGGGACCGAGUCGGUCC (SEQ ID No: 1935).

[0311] In some embodiments, a PEgRNA comprises a gRNA core comprising the sequence GUUUAAGAGCUAGAAAUAGCAAGUUUAAAUAAGGCUAGUCCGUUAUCAACUUGAAAA AGUGGCACCGAGUCGGUGC (SEQ ID No: 1974). In some embodiments, a PEgRNA comprise a gRNA core comprising the sequence GUUUUAGAGCUAUGCUGGAAACAGCAUAGCAAGUUAAAAUAAGGCUAGUCCGUUAUC AACUUGAAAAAGUGGCACCGAGUCGGUGC (SEQ ID No: 1975).

[0312] In some embodiments, a PEgRNA comprise a gRNA core comprising the sequence GUUUAAGAGCUAUGCUGGAAACAGCAUAGCAAGUUUAAAUAAGGCUAGUCCGUUAUC AACUUGAAAAAGUGGCACCGAGUCGGUGC (SEQ ID No: 1858).

[0313] A PEgRNA and/or an ngRNA of this disclosure, in some embodiments, may include modified nucleotides, e.g., chemically modified DNA or RNA nucleobases, and may include one or more nucleobase analogs (e.g., modifications which might add functionality, such as temperature resilience). In some embodiments, PEgRNAs and/or ngRNAs as described herein may be chemically modified. The phrase “chemical modifications,” as used herein, can include modifications which introduce chemistries which differ from those seen in naturally occurring DNA or RNAs, for example, covalent modifications such as the introduction of modified nucleotides, (e.g., nucleotide analogs, or the inclusion of pendant groups which are not naturally found in DNA or RNA molecules).

[0314] In some embodiments, the PEgRNAs provided in the disclosure may further comprise nucleotides added to the 5′ of the PEgRNAs. In some embodiments, the PEgRNA further comprises 1, 2, or 3 additional nucleotides added to the 5′ end. The additional nucleotides can be guanine, cytosine, adenine, or uracil. In some embodiments, the additional nucleotide at the 5′ end of the PEgRNA is a guanine or cytosine. In some embodiments, the additional nucleotides can be chemically or biologically modified.

[0315] In some embodiments, the PEgRNAs provided in the disclosure may further comprise nucleotides to the 3′ of the PEgRNAs. In some embodiments, the PEgRNA further comprises 1, 2, or 3 additional nucleotides to the 3′ end. The additional nucleotides can be guanine, cytosine, adenine, or uracil. In some embodiments, the additional nucleotides at the 3′ end of the PEgRNA is a polynucleotide comprising at least 1 uracil. In some embodiments, the additional nucleotides can be chemically or biologically modified.

[0316] In some embodiments, a PEgRNA or ngRNA is produced by transcription from a template nucleotide, for example, a template plasmid. In some embodiments, a polynucleotide encoding the PEgRNA or ngRNA is appended with one or more additional nucleotides that improves PEgRNA or ngRNA function or expression, e.g., expression from a plasmid that encodes the PEgRNA or ngRNA. In some embodiments, a polynucleotide encoding a PEgRNA or ngRNA is appended with one or more additional nucleotides at the 5′ end or at the 3′ end. In some embodiments, the polynucleotide encoding the PEgRNA or ngRNA is appended with a guanine at the 5′ end, for example, if the first nucleotide at the 5′ end of the spacer is not a guanine. In some embodiments, a polynucleotide encoding the PEgRNA or ngRNA is appended with nucleotide sequence CACC at the 5′ end. In some embodiments, the polynucleotide encoding the PEgRNA or ngRNA is appended with an additional nucleotide adenine at the 3′ end, for example, if the last nucleotide at the 3′ end of the PBS is a Thymine. In some embodiments, the polynucleotide encoding the PEgRNA or ngRNA is appended with additional nucleotide sequence TTTTTT, TTTTTTT, TTTTT, or TTTT at the 3′ end. In some embodiments, the PEgRNA or ngRNA comprises the appended nucleotides from the transcription template. In some embodiments, the PEgRNA or ngRNA further comprises one or more nucleotides at the 5′ end or the 3′ end in addition to spacer, PBS, and RTT sequences. in some embodiments, the PEgRNA or ngRNA further comprises a guanine at the 5′ end, for example, when the first nucleotide at the 5′ end of the spacer is not a guanine. In some embodiments, the PEgRNA or ngRNA further comprises nucleotide sequence CACC at the 5′ end. In some embodiments, the PEgRNA or ngRNA further comprises an adenine at the 3′ end, for example, if the last nucleotide at the 3′ end of the PBS is a thymine. In some embodiments, the PEgRNA or ngRNA further comprises nucleotide sequence UUUUUUU, UUUUUU, UUUUU, or UUUU at the 3′ end.

[0317] In some embodiments, the PEgRNAs and/or ngRNAs provided in this disclosure may have undergone a chemical or biological modifications. Modifications may be made at any position within a PEgRNA or ngRNA, and may include modification to a nucleobase or to a phosphate backbone of the PEgRNA or ngRNA. In some embodiments, chemical modifications can be a structure guided modifications. In some embodiments, a chemical modification is at the 5′ end and/or the 3′ end of a PEgRNA. In some embodiments, a chemical modification is at the 5′ end and/or the 3′ end of a ngRNA. In some embodiments, a chemical modification may be within the spacer sequence, the extension arm, the editing template sequence, or the primer binding site of a PEgRNA. In some embodiments, a chemical modification may be within the spacer sequence or the gRNA core of a PEgRNA or a ngRNA. In some embodiments, a chemical modification may be within the 3′ most nucleotides of a PEgRNA or ngRNA. In some embodiments, a chemical modification may be within the 3′ most end of a PEgRNA or ngRNA comprises 1, 2, 3, 4, 5, 6, 7, 8, 9, 10 or more chemically modified nucleotides at the 3′ end. In some embodiments, a PEgRNA or ngRNA comprises 3 contiguous chemically modified nucleotides at the 3′ end. In some embodiments, a chemical modification may be within the 5′ most end of a PEgRNA or ngRNA. In some embodiments, a PEgRNA or ngRNA comprises 1, 2, 3, 4, 5, 6, 7, 8, 9, 10 or more chemically modified nucleotides at the 3′ end. In some embodiments, a PEgRNA or ngRNA comprises 1, 2, 3, 4, 5, 6, 7, 8, 9, 10 or more chemically modified nucleotides at the 5′ end. In some embodiments, a PEgRNA or ngRNA comprises 1, 2, 3, 4, or 5 or more chemically modified nucleotides at the 3′ end. In some embodiments, a PEgRNA or ngRNA comprises 1, 2, 3, 4, or 5 more chemically modified nucleotides at the 5′ end. In some embodiments, a PEgRNA or ngRNA comprises 1, 2, or 3 or more chemically modified nucleotides at the 3′ end. In some embodiments, a PEgRNA or ngRNA comprises 1, 2, or 3 more chemically modified nucleotides at the 5′ end. In some embodiments, a PEgRNA or ngRNA comprises 1, 2, 3, 4, 5, 6, 7, 8, 9, 10 or more contiguous chemically modified nucleotides at the 3′ end. In some embodiments, a PEgRNA or ngRNA comprises 1, 2, 3, 4, 5, 6, 7, 8, 9, 10 or more contiguous chemically modified nucleotides at the 5′ end. In some embodiments, a PEgRNA or ngRNA comprises 1, 2, 3, 4, or 5 contiguous chemically modified nucleotides at the 3′ end. In some embodiments, a PEgRNA or ngRNA comprises 1, 2, 3, 4, or 5 contiguous chemically modified nucleotides at the 5′ end. In some embodiments, a PEgRNA or ngRNA comprises 1, 2, or 3 contiguous chemically modified nucleotides at the 3′ end. In some embodiments, a PEgRNA or ngRNA comprises 1, 2, or 3 contiguous chemically modified nucleotides at the 5′ end. In some embodiments, a PEgRNA or ngRNA comprises 3 contiguous chemically modified nucleotides at the 3′ end. In some embodiments, a PEgRNA or ngRNA comprises 1, 2, 3, 4, 5, or more chemically modified nucleotides near the 3′ end. In some embodiments, a PEgRNA or ngRNA comprises 3 contiguous chemically modified nucleotides at the 3′ end. In some embodiments, a PEgRNA or ngRNA comprises 3 contiguous chemically modified nucleotides at the 5′ end. In some embodiments, a PEgRNA or ngRNA comprises 1, 2, 3, 4, 5, or more chemically modified nucleotides near the 3′ end. In some embodiments, a PEgRNA or ngRNA comprises 1, 2, 3, 4, 5, or more contiguous chemically modified nucleotides near the 3′ end. In some embodiments, a PEgRNA or ngRNA comprises 1, 2, 3, 4, 5, or more chemically modified nucleotides near the 3′ end, where the 3′ most nucleotide is not modified, and the 1, 2, 3, 4, 5, or more chemically modified nucleotides precede the 3′ most nucleotide in a 5′-to-3′ order. In some embodiments, a PEgRNA or ngRNA comprises 1, 2, 3, 4, 5, 6, 7, 8, 9, 10, 11, 12, 13, 14, 15, 16, 17, 18, 19, 20, 21, 22, 23, 24, 25, 26, 27, 28, 29, 30, 31, 32, 33, 34, 35 or more chemically modified nucleotides near the 3′ end, where the 3′ most nucleotide is not modified, and the 1, 2, 3, 4, 5, 6, 7, 8, 9, 10, 11, 12, 13, 14, 15, 16, 17, 18, 19, 20, 21, 22, 23, 24, 25, 26, 27, 28, 29, 30, 31, 32, 33, 34, 35 or more chemically modified nucleotides precede the 3′ most nucleotide in a 5′-to-3′ order.

[0318] In some embodiments, a PEgRNA or ngRNA comprises one or more chemical modified nucleotides in the gRNA core. As exemplified in FIG. 3, the gRNA core of a PEgRNA may comprise one or more regions of a base paired lower stem, a base paired upper stem, where the lower stem and upper stem may be connected by a bulge comprising unpaired RNAs. The gRNA core may further comprise a nexus distal from the spacer sequence. In some embodiments, the gRNA core comprises one or more chemically modified nucleotides in the lower stem, upper stem, and/or the hairpin regions. In some embodiments, all of the nucleotides in the lower stem, upper stem, and/or the hairpin regions are chemically modified.

[0319] A chemical modification to a PEgRNA or ngRNA can comprise a 2′-O-thionocarbamate-protected nucleoside phosphoramidite, a 2′-O-methyl (M), a 2′-O-methyl 3′ phosphorothioate (MS), or a 2′-O-methyl 3′ thioPACE (MSP), or any combination thereof. In some embodiments, a chemically modified PEgRNA and/or ngRNA can comprise a 2′-O-methyl (M) RNA, a 2′-O-methyl 3′ phosphorothioate (MS) RNA, a 2′-O-methyl 3′ thioPACE (MSP) RNA, a 2′-F RNA, a phosphorothioate bond modification, any other chemical modifications known in the art, or any combination thereof. A chemical modification may also include, for example, the incorporation of non-nucleotide linkages or modified nucleotides into the PEgRNA and/or ngRNA (e.g., modifications to one or both of the 3′ and 5′ ends of a guide RNA molecule). Such modifications can include the addition of bases to an RNA sequence, complexing the RNA with an agent (e.g., a protein or a complementary nucleic acid molecule), and inclusion of elements which change the structure of an RNA molecule (e.g., which form secondary structures).

### Prime Editing Compositions

[0320] Disclosed herein, in some embodiments, are compositions, systems, and methods using a prime editing composition. The term “prime editing composition” or “prime editing system” refers to compositions involved in the method of prime editing as described herein. A prime editing composition may include a prime editor, e.g., a prime editor fusion protein, and a PEgRNA. A prime editing composition may further comprise additional elements, such as second strand nicking ngRNAs. Components of a prime editing composition may be combined to form a complex for prime editing, or may be kept separately, e.g., for administration purposes.

[0321] In some embodiments, a prime editing composition comprises a prime editor fusion protein complexed with a PEgRNA and optionally complexed with a ngRNA. In some embodiments, the prime editing composition comprises a prime editor comprising a DNA binding domain and a DNA polymerase domain associated with each other through a PEgRNA. For example, the prime editing composition may comprise a prime editor comprising a DNA binding domain and a DNA polymerase domain linked to each other by an RNA-protein recruitment aptamer RNA sequence, which is linked to a PEgRNA. In some embodiments, a prime editing composition comprises a PEgRNA and a polynucleotide, a polynucleotide construct, or a vector that encodes a prime editor fusion protein.

[0322] In some embodiments, a prime editing composition comprises a PEgRNA, a ngRNA, and a polynucleotide, a polynucleotide construct, or a vector that encodes a prime editor fusion protein. In some embodiments, a prime editing composition comprises multiple polynucleotides, polynucleotide constructs, or vectors, each of which encodes one or more prime editing composition components. In some embodiments, the PEgRNA of a prime editing composition is associated with the DNA binding domain, e.g., a Cas9 nickase, of the prime editor. In some embodiments, the PEgRNA of a prime editing composition complexes with the DNA binding domain of a prime editor and directs the prime editor to the target DNA.

[0323] In some embodiments, a prime editing composition comprises one or more polynucleotides that encode prime editor components and/or PEgRNA or ngRNAs. In some embodiments, a prime editing composition comprises a polynucleotide encoding a fusion protein comprising a DNA binding domain and a DNA polymerase domain. In some embodiments, a prime editing composition comprises (i) a polynucleotide encoding a fusion protein comprising a DNA binding domain and a DNA polymerase domain, and (ii) a PEgRNA or a polynucleotide encoding the PEgRNA. In some embodiments, a prime editing composition comprises (i) a polynucleotide encoding a fusion protein comprising a DNA binding domain and a DNA polymerase domain, (ii) a PEgRNA or a polynucleotide encoding the PEgRNA, and (iii) an ngRNA or a polynucleotide encoding the ngRNA. In some embodiments, a prime editing composition comprises (i) a polynucleotide encoding a DNA binding domain of a prime editor, e.g., a Cas9 nickase, (ii) a polynucleotide encoding a DNA polymerase domain of a prime editor, e.g., a reverse transcriptase, and (iii) a PEgRNA or a polynucleotide encoding the PEgRNA. In some embodiments, a prime editing composition comprises (i) a polynucleotide encoding a DNA binding domain of a prime editor, e.g., a Cas9 nickase, (ii) a polynucleotide encoding a DNA polymerase domain of a prime editor, e.g., a reverse transcriptase, (iii) a PEgRNA or a polynucleotide encoding the PEgRNA, and (iv) an ngRNA or a polynucleotide encoding the ngRNA.

[0324] In some embodiments, the polynucleotide encoding the DNA biding domain or the polynucleotide encoding the DNA polymerase domain further encodes an additional polypeptide domain, e.g., an RNA-protein recruitment domain, such as a MS2 coat protein domain. In some embodiments, a prime editing composition comprises (i) a polynucleotide encoding a N-terminal half of a prime editor fusion protein and an intein-N and (ii) a polynucleotide encoding a C-terminal half of a prime editor fusion protein and an intein-C. In some embodiments, a prime editing composition comprises (i) a polynucleotide encoding a N-terminal half of a prime editor fusion protein and an intein-N (ii) a polynucleotide encoding a C-terminal half of a prime editor fusion protein and an intein-C, (iii) a PEgRNA or a polynucleotide encoding the PEgRNA, and/or (iv) an ngRNA or a polynucleotide encoding the ngRNA. In some embodiments, a prime editing composition comprises (i) a polynucleotide encoding a N-terminal portion of a DNA binding domain and an intein-N, (ii) a polynucleotide encoding a C-terminal portion of the DNA binding domain, an intein-C, and a DNA polymerase domain. In some embodiments, the DNA binding domain is a Cas protein domain, e.g., a Cas9 nickase. In some embodiments, the prime editing composition comprises (i) a polynucleotide encoding a N-terminal portion of a DNA binding domain and an intein-N, (ii) a polynucleotide encoding a C-terminal portion of the DNA binding domain, an intein-C, and a DNA polymerase domain, (iii) a PEgRNA or a polynucleotide encoding the PEgRNA, and/or (iv) a ngRNA or a polynucleotide encoding the ngRNA.

[0325] In some embodiments, a prime editing system comprises one or more polynucleotides encoding one or more prime editor polypeptides, wherein activity of the prime editing system may be temporally regulated by controlling the timing in which the vectors are delivered. For example, in some embodiments, a polynucleotide encoding the prime editor and a polynucleotide encoding a PEgRNA may be delivered simultaneously. For example, in some embodiments, a polynucleotide encoding the prime editor and a polynucleotide encoding a PEgRNA may be delivered sequentially.

[0326] In some embodiments, a polynucleotide encoding a component of a prime editing system may further comprise an element that is capable of modifying the intracellular half-life of the polynucleotide and/or modulating translational control. In some embodiments, the polynucleotide is a RNA, for example, an mRNA. In some embodiments, the half-life of the polynucleotide, e.g., the RNA may be increased. In some embodiments, the half-life of the polynucleotide, e.g., the RNA may be decreased. In some embodiments, the element may be capable of increasing the stability of the polynucleotide, e.g., the RNA. In some embodiments, the element may be capable of decreasing the stability of the polynucleotide, e.g., the RNA. In some embodiments, the element may be within the 3′ UTR of the RNA. In some embodiments, the element may include a polyadenylation signal (PA). In some embodiments, the element may include a cap, e.g., an upstream mRNA or PEgRNA end. In some embodiments, the RNA may comprise no PA such that it is subject to quicker degradation in the cell after transcription.

[0327] In some embodiments, the element may include at least one AU-rich element (ARE). The AREs may be bound by ARE binding proteins (ARE-BPs) in a manner that is dependent upon tissue type, cell type, timing, cellular localization, and environment. In some embodiments the destabilizing element may promote RNA decay, affect RNA stability, or activate translation. In some embodiments, the ARE may comprise 50 to 150 nucleotides in length. In some embodiments, the ARE may comprise at least one copy of the sequence AUUUA. In some embodiments, at least one ARE may be added to the 3′ UTR of the RNA. In some embodiments, the element may be a Woodchuck Hepatitis Virus Posttranscriptional Regulatory Element (WPRE). In further embodiments, the element is a modified and/or truncated WPRE sequence that is capable of enhancing expression from the transcript. In some embodiments, the WPRE or equivalent may be added to the 3′ UTR of the RNA. In some embodiments, the element may be selected from other RNA sequence motifs that are enriched in either fast- or slow-decaying transcripts. In some embodiments, the polynucleotide, e.g., a vector, encoding the PE or the PEgRNA may be self-destroyed via cleavage of a target sequence present on the polynucleotide, e.g., a vector. The cleavage may prevent continued transcription of a PE or a PEgRNA.

[0328] Polynucleotides encoding prime editing composition components can be DNA, RNA, or any combination thereof. In some embodiments, a polynucleotide encoding a prime editing composition component is an expression construct. In some embodiments, a polynucleotide encoding a prime editing composition component is a vector. In some embodiments, the vector is a DNA vector. In some embodiments, the vector is a plasmid. In some embodiments, the vector is a virus vector, e.g., a retroviral vector, adenoviral vector, lentiviral vector, herpesvirus vector, or an adeno-associated virus vector (AAV).

[0329] In some embodiments, polynucleotides encoding polypeptide components of a prime editing composition are codon optimized by replacing at least one codon (e.g., about or more than about 1, 2, 3, 4, 5, 10, 15, 20, 25, 50, or more codons) of the native sequence with codons that are more frequently or most frequently used in the genes of that host cell while maintaining the native amino acid sequence. In some embodiments, a polynucleotide encoding a polypeptide component of a prime editing composition are operably linked to one or more expression regulatory elements, for example, a promoter, a 3′ UTR, a 5′ UTR, or any combination thereof. In some embodiments, a polynucleotide encoding a prime editing composition component is a messenger RNA (mRNA). In some embodiments, the mRNA comprises a Cap at the 5′ end and/or a poly A tail at the 3′ end.

[0330] Unless otherwise indicated, references to nucleotide positions in human chromosomes are as set forth in human genome assembly consortium Human build 38 (GRCh38), GenBank accession GCF_000001405.38.

[0331] Provided herein in some embodiments are example sequences for PEgRNAs, including PEgRNA spacers, PBS, RTT, and ngRNA spacers for a prime editing system comprising a nuclease that recognizes the PAM sequence “NG.” In some embodiments, a PAM motif on the edit strand comprises an “NG” motif, wherein N is any nucleotide.

### Pharmaceutical Compositions

[0332] Disclosed herein are pharmaceutical compositions comprising any of the prime editing composition components, for example, prime editors, fusion proteins, polynucleotides encoding prime editor polypeptides, PEgRNAs, ngRNAs, and/or prime editing complexes described herein.

[0333] The term “pharmaceutical composition”, as used herein, refers to a composition formulated for pharmaceutical use. In some embodiments, the pharmaceutical composition further comprises a pharmaceutically acceptable carrier. In some embodiments, the pharmaceutical composition comprises additional agents, e.g., for specific delivery, increasing half-life, or other therapeutic compounds.

[0334] In some embodiments, a pharmaceutically-acceptable carrier comprises any vehicle, such as a liquid or solid filler, diluent, excipient, manufacturing aid (e.g., lubricant, talc magnesium, calcium or zinc stearate, or steric acid), or solvent encapsulating material, involved in carrying or transporting the compound from one site (e.g., the delivery site) of the body, to another site (e.g., organ, tissue or portion of the body). A pharmaceutically acceptable carrier is “acceptable” in the sense of being compatible with the other ingredients of the formulation and not injurious to the tissue of the subject (e.g., physiologically compatible, sterile, physiologic pH, etc.)

[0335] Formulations of the pharmaceutical compositions described herein can be prepared by any method known or hereafter developed in the art of pharmacology. In general, such preparatory methods include the step of bringing the active ingredient(s) into association with an excipient and/or one or more other accessory ingredients, and then, if necessary and/or desirable, shaping and/or packaging the product into a desired single- or multi-dose unit. Pharmaceutical formulations can additionally comprise a pharmaceutically acceptable excipient, which, as used herein, includes any and all solvents, dispersion media, diluents, or other liquid vehicles, dispersion or suspension aids, surface active agents, isotonic agents, thickening or emulsifying agents, preservatives, solid binders, lubricants and the like, as suited to the particular dosage form desired.

### Methods of Editing

[0336] The methods and compositions disclosed herein can be used to edit a target gene of interest by prime editing.

[0337] In some embodiments, the prime editing method comprises contacting a target gene, e.g., a RHO gene, with a PEgRNA and a prime editor (PE) polypeptide described herein. In some embodiments, the target gene is double stranded, and comprises two strands of DNA complementary to each other. In some embodiments, the contacting with a PEgRNA and the contacting with a prime editor are performed sequentially. In some embodiments, the contacting with a prime editor is performed after the contacting with a PEgRNA. In some embodiments, the contacting with a PEgRNA is performed after the contacting with a prime editor. In some embodiments, the contacting with a PEgRNA, and the contacting with a prime editor are performed simultaneously. In some embodiments, the PEgRNA and the prime editor are associated in a complex prior to contacting a target gene.

[0338] In some embodiments, contacting the target gene with the prime editing composition results in binding of the PEgRNA to a target strand of the target gene, e.g., a RHO gene. In some embodiments, contacting the target gene with the prime editing composition results in binding of the PEgRNA to a search target sequence on the target strand of the target gene upon contacting with the PEgRNA. In some embodiments, contacting the target gene with the prime editing composition results in binding of a spacer sequence of the PEgRNA to a search target sequence with the search target sequence on the target strand of the target gene upon said contacting of the PEgRNA.

[0339] In some embodiments, contacting the target gene with the prime editing composition results in binding of the prime editor to the target gene, e.g., the target RHO gene, upon the contacting of the PE composition with the target gene. In some embodiments, the DNA binding domain of the PE associates with the PEgRNA. In some embodiments, the PE binds the target gene, e.g., a RHO gene, directed by the PEgRNA. Accordingly, in some embodiments, the contacting of the target gene result in binding of a DNA binding domain of a prime editor of the target RHO gene directed by the PEgRNA.

[0340] In some embodiments, contacting the target gene with the prime editing composition results in a nick in an edit strand of the target gene, e.g., a RHO gene by the prime editor upon contacting with the target gene, thereby generating a nicked on the edit strand of the target gene. In some embodiments, contacting the target gene with the prime editing composition results in a single-stranded DNA comprising a free 3′ end at the nick site of the edit strand of the target gene. In some embodiments, contacting the target gene with the prime editing composition results in a nick in the edit strand of the target gene by a DNA binding domain of the prime editor, thereby generating a single-stranded DNA comprising a free 3′ end at the nick site. In some embodiments, the DNA binding domain of the prime editor is a Cas domain. In some embodiments, the DNA binding domain of the prime editor is a Cas9. In some embodiments, the DNA binding domain of the prime editor is a Cas9 nickase.

[0341] In some embodiments, contacting the target gene with the prime editing composition results in hybridization of the PEgRNA with the 3′ end of the nicked single-stranded DNA, thereby priming DNA polymerization by a DNA polymerase domain of the prime editor. In some embodiments, the free 3′ end of the single-stranded DNA generated at the nick site hybridizes to a primer binding site sequence (PBS) of the contacted PEgRNA, thereby priming DNA polymerization. In some embodiments, the DNA polymerization is reverse transcription catalyzed by a reverse transcriptase domain of the prime editor. In some embodiments, the method comprises contacting the target gene with a DNA polymerase, e.g., a reverse transcriptase, as a part of a prime editor fusion protein or prime editing complex (in cis), or as a separate protein (in trans).

[0342] In some embodiments, contacting the target gene with the prime editing composition generates an edited single stranded DNA that is coded by the editing template of the PEgRNA by DNA polymerase mediated polymerization from the 3′ free end of the single-stranded DNA at the nick site. In some embodiments, the editing template of the PEgRNA comprises one or more intended nucleotide edits compared to endogenous sequence of the target gene, e.g., a RHO gene. In some embodiments, the intended nucleotide edits are incorporated in the target gene, by excision of the 5′ single stranded DNA of the edit strand of the target gene generated at the nick site and DNA repair. In some embodiments, the intended nucleotide edits are incorporated in the target gene by excision of the editing target sequence and DNA repair. In some embodiments, excision of the 5′ single stranded DNA of the edit strand generated at the nick site is by a flap endonuclease. In some embodiments, the flap nuclease is FEN1. In some embodiments, the method further comprises contacting the target gene with a flap endonuclease. In some embodiments, the flap endonuclease is provided as a part of a prime editor fusion protein. In some embodiments, the flap endonuclease is provided in trans.

[0343] In some embodiments, contacting the target gene with the prime editing composition generates a mismatched heteroduplex comprising the edit strand of the target gene that comprises the edited single stranded DNA, and the unedited target strand of the target gene. Without being bound by theory, the endogenous DNA repair and replication may resolve the mismatched edited DNA to incorporate the nucleotide change(s) to form the desired edited target gene.

[0344] In some embodiments, the method further comprises contacting the target gene, e.g., a RHO gene, with a nick guide (ngRNA) disclosed herein. In some embodiments, the ngRNA comprises a spacer that binds a second search target sequence on the edit strand of the target gene. In some embodiments, the contacted ngRNA directs the PE to introduce a nick in the target strand of the target gene. In some embodiments, the nick on the target strand (non-edit strand) results in endogenous DNA repair machinery to use the edit strand to repair the non-edit strand, thereby incorporating the intended nucleotide edit in both strand of the target gene and modifying the target gene. In some embodiments, the ngRNA comprises a spacer sequence that is complementary to, and may hybridize with, the second search target sequence on the edit strand only after the intended nucleotide edit(s) are incorporated in the edit strand of the target gene.

[0345] In some embodiments, the target gene is contacted by the ngRNA, the PEgRNA, and the PE simultaneously. In some embodiments, the ngRNA, the PEgRNA, and the PE form a complex when they contact the target gene. In some embodiments, the target gene is contacted with the ngRNA, the PEgRNA, and the prime editor sequentially. In some embodiments, the target gene is contacted with the ngRNA and/or the PEgRNA after contacting the target gene with the PE. In some embodiments, the target gene is contacted with the ngRNA and/or the PEgRNA before contacting the target gene with the prime editor.

[0346] In some embodiments, the target gene, e.g., a RHO gene, is in a cell. Accordingly, also provided herein are methods of modifying a cell, such as a human cell, a human primary cell, a human iPSC-derived cell, and/or a human photoreceptor.

[0347] In some embodiments, the prime editing method comprises introducing a PEgRNA, a prime editor, and/or a ngRNA into the cell that has the target gene. In some embodiments, the prime editing method comprises introducing into the cell that has the target gene with a prime editing composition comprising a PEgRNA, a prime editor polypeptide, and/or a ngRNA. In some embodiments, the PEgRNA, the prime editor polypeptide, and/or the ngRNA form a complex prior to the introduction into the cell. In some embodiments, the PEgRNA, the prime editor polypeptide, and/or the ngRNA form a complex after the introduction into the cell. The prime editors, PEgRNA and/or ngRNAs, and prime editing complexes may be introduced into the cell by any delivery approaches described herein or any delivery approach known in the art, including ribonucleoprotein (RNPs), lipid nanoparticles (LNPs), viral vectors, non-viral vectors, mRNA delivery, and physical techniques such as cell membrane disruption by a microfluidics device. The prime editors, PEgRNA and/or ngRNAs, and prime editing complexes may be introduced into the cell simultaneously or sequentially.

[0348] In some embodiments, the prime editing method comprises introducing into the cell a PEgRNA or a polynucleotide encoding the PEgRNA, a prime editor polynucleotide encoding a prime editor polypeptide, and optionally an ngRNA or a polynucleotide encoding the ngRNA. In some embodiments, the method comprises introducing the PEgRNA or the polynucleotide encoding the PEgRNA, the polynucleotide encoding the prime editor polypeptide, and/or the ngRNA or the polynucleotide encoding the ngRNA into the cell simultaneously. In some embodiments, the method comprises introducing the PEgRNA or the polynucleotide encoding the PEgRNA, the polynucleotide encoding the prime editor polypeptide, and/or the ngRNA or the polynucleotide encoding the ngRNA into the cell sequentially. In some embodiments, the method comprises introducing the polynucleotide encoding the prime editor polypeptide into the cell before introduction of the PEgRNA or the polynucleotide encoding the PEgRNA and/or the ngRNA or the polynucleotide encoding the ngRNA. In some embodiments, the polynucleotide encoding the prime editor polypeptide is introduced into and expressed in the cell before introduction of the PEgRNA or the polynucleotide encoding the PEgRNA and/or the ngRNA or the polynucleotide encoding the ngRNA into the cell. In some embodiments, the polynucleotide encoding the prime editor polypeptide is introduced into the cell after the PEgRNA or the polynucleotide encoding the PEgRNA and/or the ngRNA or the polynucleotide encoding the ngRNA are introduced into the cell. The polynucleotide encoding the prime editor polypeptide, the PEgRNA or the polynucleotide encoding the PEgRNA, and/or the ngRNA or the polynucleotide encoding the ngRNA, may be introduced into the cell by any delivery approaches described herein or any delivery approach known in the art, for example, by RNPs, LNPs, viral vectors, non-viral vectors, mRNA delivery, and physical delivery. In some embodiments, the polynucleotide is a DNA polynucleotide. In some embodiments, the polynucleotide is a RNA polynucleotide, e.g., mRNA polynucleotide.

[0349] In some embodiments, the polynucleotide encoding the prime editor polypeptide, the poly nucleotide encoding the PEgRNA, and/or the polynucleotide encoding the ngRNA integrate into the genome of the cell after being introduced into the cell. In some embodiments, the polynucleotide encoding the prime editor polypeptide, the polynucleotide encoding the PEgRNA, and/or the polynucleotide encoding the ngRNA are introduced into the cell for transient expression. Accordingly, also provided herein are cells modified by prime editing.

[0350] In some embodiments, the cell is a eukaryotic cell. In some embodiments, the cell is a mammalian cell. In some embodiments, the cell is a non-human primate cell, bovine cell, porcine cell, rodent or mouse cell. In some embodiments, the cell is a human cell.

[0351] In some embodiments, the cell is a progenitor cell. In some embodiments, the cell is a stem cell. in some embodiments, the cell is an induced pluripotent stein cell. In some embodiments, the cell is an embryonic stem cell. In some embodiments, the cell is a retinal progenitor cell. In some embodiments, the cell is a retina precursor cell. In some embodiments, the cell is a fibroblast.

[0352] In some embodiments, the cell is a human progenitor cell. In some embodiments, the cell is a human stem cell. in some embodiments, the cell is an induced human pluripotent stein cell. In some embodiments, the cell is a human embryonic stem cell. In some embodiments, the cell is a human retinal progenitor cell. In some embodiments, the cell is a human retina precursor cell. In some embodiments, the cell is a human fibroblast.

[0353] In some embodiments, the cell is a primary cell. In some embodiments, the cell is a human primary cell. In some embodiments, the cell is a retina cell. In some embodiments, the cell is a photoreceptor. In some embodiments, the cell is a rod cell. In some embodiments, the cell is a cone cell. In some embodiments, the cell is a human cell from a retina. In some embodiments, the cell is a human photoreceptor. In some embodiments, the cell is a human rod cell. In some embodiments, the cell is a human cone cell. In some embodiments, the cell is a primary human photoreceptor derived from an induced human pluripotent stem cell (iPSC).

[0354] In some embodiments, the target gene edited by prime editing is in a chromosome of the cell. In some embodiments, the intended nucleotide edits incorporate in the chromosome of the cell and are inheritable by progeny cells. In some embodiments, the intended nucleotide edits introduced to the cell by the prime editing compositions and methods are such that the cell and progeny of the cell also include the intended nucleotide edits. In some embodiments, the cell is autologous, allogeneic, or xenogeneic to a subject. In some embodiments, the cell is from or derived from a subject. In some embodiments, the cell is from or derived from a human subject. In some embodiments, the cell is introduced back into the subject, e.g., a human subject, after incorporation of the intended nucleotide edits by prime editing.

[0355] In some embodiments, the method provided herein comprises introducing the prime editor polypeptide or the polynucleotide encoding the prime editor polypeptide, the PEgRNA or the polynucleotide encoding the PEgRNA, and/or the ngRNA or the polynucleotide encoding the ngRNA into a plurality or a population of cells that comprise the target gene. In some embodiments, the population of cells is of the same cell type. In some embodiments, the population of cells is of the same tissue or organ. In some embodiments, the population of cells is heterogeneous. In some embodiments, the population of cells is homogeneous. In some embodiments, the population of cells is from a single tissue or organ, and the cells are heterogeneous. In some embodiments, the introduction into the population of cells is ex vivo. In some embodiments, the introduction into the population of cells is in vivo, e.g., into a human subject.

[0356] In some embodiments, the target gene is in a genome of each cell of the population. In some embodiments, introduction of the prime editor polypeptide or the polynucleotide encoding the prime editor polypeptide, the PEgRNA or the polynucleotide encoding the PEgRNA, and/or the ngRNA or the polynucleotide encoding the ngRNA results in incorporation of one or more intended nucleotide edits in the target gene in at least one of the cells in the population of cells. In some embodiments, introduction of the prime editor polypeptide or the polynucleotide encoding the prime editor polypeptide, the PEgRNA or the polynucleotide encoding the PEgRNA, and/or the ngRNA or the polynucleotide encoding the ngRNA results in incorporation of the one or more intended nucleotide edits in the target gene in a plurality of the population of cells. In some embodiments, introduction of the prime editor polypeptide or the polynucleotide encoding the prime editor polypeptide, the PEgRNA or the polynucleotide encoding the PEgRNA, and/or the ngRNA or the polynucleotide encoding the ngRNA results in incorporation of the one or more intended nucleotide edits in the target gene in each cell of the population of cells. In some embodiments, introduction of the prime editor polypeptide or the polynucleotide encoding the prime editor polypeptide, the PEgRNA or the polynucleotide encoding the PEgRNA, and/or the ngRNA or the polynucleotide encoding the ngRNA results in incorporation of the one or more intended nucleotide edits in the target gene in sufficient number of cells such that the disease or disorder is treated, prevented or ameliorated.

[0357] In some embodiments, editing efficiency of the prime editing compositions and method described herein can be measured by calculating the percentage of edited target genes in a population of cells introduced with the prime editing composition. In some embodiments, the editing efficiency is determined after 1 hour, 2 hours, 6 hours, 12 hours, 24 hours, 36 hours, 48 hours, 3 days, 4 days, 5 days, 7 days, 10 days, or 14 days of exposing a target gene (e.g., a RHO gene within the genome of a cell) to a prime editing composition. In some embodiments, editing efficiency of the prime editing compositions and method described herein can be measured by calculating the percentage of edited target genes in a population of cells introduced with the prime editing composition. In some embodiments, the editing efficiency is determined after 5, 6, 7, 8, 9, 10, 11, 12, 13, 14, 15, or 16 weeks of exposing a target gene (e.g., a RI-TO gene within the genome of a cell) to a prime editing composition. In some embodiments, the population of cells introduced with the prime editing composition is ex vivo. In some embodiments, the population of cells introduced with the prime editing composition is in vitro. In some embodiments, the population of cells introduced with the prime editing composition is in vivo. In some embodiments, the prime editing methods disclosed herein have an editing efficiency of at least about 1%, at least about 5%, at least about 10%, at least about 20%, at least about 30%, at least about 40%, at least about 50%, at least about 60%, at least about 70%, at least about 80%, at least about 90%, at least about 95%, or at least about 99% relative to a suitable control. In some embodiments, the prime editing methods disclosed herein have an editing efficiency of at least 25% relative to a suitable control. In some embodiments, the prime editing methods disclosed herein have an editing efficiency of at least 35% relative to a suitable control. prime editing method disclosed herein has an editing efficiency of at least 30% relative to a suitable control. In some embodiments, the prime editing methods disclosed herein have an editing efficiency of at least 45% relative to a suitable control. In some embodiments, the prime editing methods disclosed herein have an editing efficiency of at least 50% relative to a suitable control. In some embodiments, editing efficiency of prime the prime editing compositions and method described herein can be measured by calculating the percentage of edited target genes in a population of cells after in vivo engraftment of the edited cells. In some embodiments, the editing efficiency is determined after 5, 6, 7, 8, 9, 10, 11, 12, 13, 14, 15, or 16 weeks of engraftment. In some embodiments, the editing efficiency is determined after 8 or 16 weeks of engraftment. In some embodiments, prime editing is able to maintain in edited cells at least about 10%, about 15%, about 20%, about 25%, about 30%, about 35%, about 40%, about 45%, about 50%, about 55%, about 60%, about 65%, about 70%, about 75%, about 80%, about 85%, about 90%, about 95% or more than 95% of editing efficiency after 8 or 16 Necks post engraftment.

[0358] In some embodiments, the methods disclosed herein have an editing efficiency of at least about 1%, at least about 5%, at least about 7.5%, at least about 10%, at least about 15%, at least about 20%, at least about 30%, at least about 40%, at least about 50%, at least about 60%, at least about 70%, at least about 80%, at least about 90%, or at least about 95% of editing a primary cell (as measured in a population of primary cells) relative to a suitable control.

[0359] In some embodiments, the methods disclosed herein have an editing efficiency of at least about 5%, at least about 7.5%, at least about 10%, at least about 15%, at least about 20%, at least about 30%, at least about 40%, at least about 50%, at least about 60%, at least about 70%, at least about 80%, at least about 90%, or at least about 95% of editing a target cell (e.g., a human primary cell, human iPSC, human fibroblast, or human photoreceptor) relative to a corresponding control target cell. In some embodiments, the target cell is a human cell (e.g., a human primary cell, human iPSC, human fibroblast, or human photoreceptor).

[0360] In some embodiments, the prime editing compositions provided herein are capable of incorporated one or more intended nucleotide edits without generating a significant proportion of indels. The term “indel(s)”, as used herein, refers to the insertion or deletion of a nucleotide base within a polynucleotide, for example, a target gene. Such insertions or deletions can lead to frame shift mutations within a coding region of a gene. Indel frequency of editing can be calculated by methods known in the art. In some embodiments, indel frequency can be calculated based on sequence alignment such as the CRISPResso 2 algorithm as described in Clement et al., Nat. Biotechnol. 37(3): 224-226 (2019), which is incorporated herein in its entirety. In some embodiments, the prime editing methods disclosed herein can have an indel frequency of less than 30%, less than 20%, less than 10%, less than 9%, less than 8%, less than 7%, less than 6%, less than 5%, less than 4%, less than 3%, less than 2%, less than 1.5%, or less than 1%.

[0361] In some embodiments, any number of indels is determined after at least 1 hour, at least 2 hours, at least 6 hours, at least 12 hours, at least 24 hours, at least 36 hours, at least 48 hours, at least 3 days, at least 4 days, at least 5 days, at least 7 days, at least 10 days, or at least 14 days of exposing a target gene (e.g., a RHO gene within the genome of a cell) to a prime editing composition.

[0362] In some embodiments, the prime editing compositions provided herein are capable of incorporated one or more intended nucleotide edits efficiently without generating a significant proportion of indels. In some embodiments, the prime editing methods disclosed herein have an editing efficiency of at least about 1% and an indel frequency of less than 1% in a target cell, e.g., a human primary cell, human iPSC, human fibroblast, or human photoreceptor. In some embodiments, the prime editing methods disclosed herein have an editing efficiency of at least about 1% and an indel frequency of less than 0.5% in a target cell, e.g., a human primary cell, human iPSC, human fibroblast, or human photoreceptor. In some embodiments, the prime editing methods disclosed herein have an editing efficiency of at least about 1% and an indel frequency of less than 0.10% in a target cell, e.g., a human primary cell, human iPSC, human fibroblast, or human photoreceptor. In some embodiments, the prime editing methods disclosed herein have an editing efficiency of at least about 5% and an indel frequency of less than 1% in a target cell, e.g., a human primary cell, human iPSC, human fibroblast, or human photoreceptor. In some embodiments, the prime editing methods disclosed herein have an editing efficiency of at least about 5% and an indel frequency of less than 0.5% in a target cell, e.g., a human primary cell, human iPSC, human fibroblast, or human photoreceptor. In some embodiments, the prime editing methods disclosed herein have an editing efficiency of at least about 5% and an indel frequency of less than 0.1% in a target cell, e.g., a human primary cell, human iPSC, human fibroblast, or human photoreceptor.

[0363] In some embodiments, the prime editing methods disclosed herein have an editing efficiency of at least about 7.5% and an indel frequency of less than 1% in a target cell, e.g., a human primary cell, human iPSC, human fibroblast, or human photoreceptor. In some embodiments, the prime editing methods disclosed herein have an editing efficiency of at least about 7.5% and an indel frequency of less than 0.5% in a target cell, e.g., a human primary cell, human iPSC, human fibroblast, or human photoreceptor. In some embodiments, the prime editing methods disclosed herein have an editing efficiency of at least about 7.5% and an indel frequency of less than 0.1% in a target cell, e.g., a human primary cell, human iPSC, human fibroblast, or human photoreceptor.

[0364] In some embodiments, the prime editing methods disclosed herein have an editing efficiency of at least about 10% and an indel frequency of less than 1% in a target cell, e.g., a human primary cell, human iPSC, human fibroblast, or human photoreceptor. In some embodiments, the prime editing methods disclosed herein have an editing efficiency of at least about 10% and an indel frequency of less than 0.5% in a target cell, e.g., a human primary cell, human iPSC, human fibroblast, or human photoreceptor. In some embodiments, the prime editing methods disclosed herein have an editing efficiency of at least about 10% and an indel frequency of less than 0.1% in a target cell, e.g., a human primary cell, human iPSC, human fibroblast, or human photoreceptor.

[0365] In some embodiments, the prime editing methods disclosed herein have an editing efficiency of at least about 15% and an indel frequency of less than 1% in a target cell, e.g., a human primary cell, human iPSC, human fibroblast, or human photoreceptor. In some embodiments, the prime editing methods disclosed herein have an editing efficiency of at least about 15% and an indel frequency of less than 0.5% in a target cell, e.g., a human primary cell, human iPSC, human fibroblast, or human photoreceptor. In some embodiments, the prime editing methods disclosed herein have an editing efficiency of at least about 15% and an indel frequency of less than 0.1% in a target cell, e.g., a human primary cell, human iPSC, human fibroblast, or human photoreceptor.

[0366] In some embodiments, the prime editing methods disclosed herein have an editing efficiency of at least about 20% and an indel frequency of less than 1% in a target cell, e.g., a human primary cell, human iPSC, human fibroblast, or human photoreceptor. In some embodiments, the prime editing methods disclosed herein have an editing efficiency of at least about 20% and an indel frequency of less than 0.5% in a target cell, e.g., a human primary cell, human iPSC, human fibroblast, or human photoreceptor. In some embodiments, the prime editing methods disclosed herein have an editing efficiency of at least about 20% and an indel frequency of less than 0.1% in a target cell, e.g., a human primary cell, human iPSC, human fibroblast, or human photoreceptor.

[0367] In some embodiments, the prime editing methods disclosed herein have an editing efficiency of at least about 30% and an indel frequency of less than 1% in a target cell, e.g., a human primary cell, human iPSC, human fibroblast, or human photoreceptor. In some embodiments, the prime editing methods disclosed herein have an editing efficiency of at least about 30% and an indel frequency of less than 0.5% in a target cell, e.g., a human primary cell, human iPSC, human fibroblast, or human photoreceptor. In some embodiments, the prime editing methods disclosed herein have an editing efficiency of at least about 30% and an indel frequency of less than 0.1% in a target cell, e.g., a human primary cell, human iPSC, human fibroblast, or human photoreceptor.

[0368] In some embodiments, the prime editing methods disclosed herein have an editing efficiency of at least about 40% and an indel frequency of less than 1% in a target cell, e.g., a human primary cell, human iPSC, human fibroblast, or human photoreceptor. In some embodiments, the prime editing methods disclosed herein have an editing efficiency of at least about 40% and an indel frequency of less than 0.5% in a target cell, e.g., a human primary cell, human iPSC, human fibroblast, or human photoreceptor. In some embodiments, the prime editing methods disclosed herein have an editing efficiency of at least about 40% and an indel frequency of less than 0.1% in a target cell, e.g., a human primary cell, human iPSC, human fibroblast, or human photoreceptor.

[0369] In some embodiments, the prime editing methods disclosed herein have an editing efficiency of at least about 50% and an indel frequency of less than 1% in a target cell, e.g., a human primary cell, human iPSC, human fibroblast, or human photoreceptor. In some embodiments, the prime editing methods disclosed herein have an editing efficiency of at least about 50% and an indel frequency of less than 0.5% in a target cell, e.g., a human primary cell, human iPSC, human fibroblast, or human photoreceptor. In some embodiments, the prime editing methods disclosed herein have an editing efficiency of at least about 50% and an indel frequency of less than 0.1% in a target cell, e.g., a human primary cell, human iPSC, human fibroblast, or human photoreceptor.

[0370] In some embodiments, the prime editing methods disclosed herein have an editing efficiency of at least about 60% and an indel frequency of less than 1% in a target cell, e.g., a human primary cell, human iPSC, human fibroblast, or human photoreceptor. In some embodiments, the prime editing methods disclosed herein have an editing efficiency of at least about 60% and an indel frequency of less than 0.5% in a target cell, e.g., a human primary cell, human iPSC, human fibroblast, or human photoreceptor. In some embodiments, the prime editing methods disclosed herein have an editing efficiency of at least about 60% and an indel frequency of less than 0.1% in a target cell, e.g., a human primary cell, human iPSC, human fibroblast, or human photoreceptor.

[0371] In some embodiments, the prime editing methods disclosed herein have an editing efficiency of at least about 70% and an indel frequency of less than 1% in a target cell, e.g., a human primary cell, human iPSC, human fibroblast, or human photoreceptor. In some embodiments, the prime editing methods disclosed herein have an editing efficiency of at least about 70% and an indel frequency of less than 0.5% in a target cell, e.g., a human primary cell, human iPSC, human fibroblast, or human photoreceptor. In some embodiments, the prime editing methods disclosed herein have an editing efficiency of at least about 70% and an indel frequency of less than 0.1% in a target cell, e.g., a human primary cell, human iPSC, human fibroblast, or human photoreceptor.

[0372] In some embodiments, the prime editing methods disclosed herein have an editing efficiency of at least about 80% and an indel frequency of less than 1% in a target cell, e.g., a human primary cell, human iPSC, human fibroblast, or human photoreceptor. In some embodiments, the prime editing methods disclosed herein have an editing efficiency of at least about 80% and an indel frequency of less than 0.5% in a target cell, e.g., a human primary cell, human iPSC, human fibroblast, or human photoreceptor. In some embodiments, the prime editing methods disclosed herein have an editing efficiency of at least about 80% and an indel frequency of less than 0.1% in a target cell, e.g., a human primary cell, human iPSC, human fibroblast, or human photoreceptor.

[0373] In some embodiments, the prime editing methods disclosed herein have an editing efficiency of at least about 90% and an indel frequency of less than 1% in a target cell, e.g., a human primary cell, human iPSC, human fibroblast, or human photoreceptor. In some embodiments, the prime editing methods disclosed herein have an editing efficiency of at least about 90% and an indel frequency of less than 0.5% in a target cell, e.g., a human primary cell, human iPSC, human fibroblast, or human photoreceptor. In some embodiments, the prime editing methods disclosed herein have an editing efficiency of at least about 90% and an indel frequency of less than 0.1% in a target cell, e.g., a human primary cell, human iPSC, human fibroblast, or human photoreceptor.

[0374] In some embodiments, the prime editing methods disclosed herein have an editing efficiency of at least about 95% and an indel frequency of less than 1% in a target cell, e.g., a human primary cell, human iPSC, human fibroblast, or human photoreceptor. In some embodiments, the prime editing methods disclosed herein have an editing efficiency of at least about 95% and an indel frequency of less than 0.5% in a target cell, e.g., a human primary cell, human iPSC, human fibroblast, or human photoreceptor. In some embodiments, the prime editing methods disclosed herein have an editing efficiency of at least about 95% and an indel frequency of less than 0.1% in a target cell, e.g., a human primary cell, human iPSC, human fibroblast, or human photoreceptor.

[0375] In some embodiments, the prime editing compositions provided herein are capable of incorporating one or more intended nucleotide edits efficiently without generating a significant proportion of indels. In some embodiments, the prime editing methods disclosed herein have an editing efficiency of at least about 1% and an indel frequency of less than 10% in a population of target cells. In some embodiments, the prime editing methods disclosed herein have an editing efficiency of at least about 1% and an indel frequency of less than 7.5% in a population of target cells. In some embodiments, the prime editing methods disclosed herein have an editing efficiency of at least about 1% and an indel frequency of less than 5% in a population of target cells. In some embodiments, the prime editing methods disclosed herein have an editing efficiency of at least about 1% and an indel frequency of less than 2.5% in a population of target cells. In some embodiments, the prime editing methods disclosed herein have an editing efficiency of at least about 1% and an indel frequency of less than 1% in a population of target cells. In some embodiments, the prime editing methods disclosed herein have an editing efficiency of at least about 1% and an indel frequency of less than 0.5% in a population of target cells. In some embodiments, the prime editing methods disclosed herein have an editing efficiency of at least about 1% and an indel frequency of less than 0.10% in a population of target cells. In some embodiments, the prime editing methods disclosed herein have an editing efficiency of at least about 5% and an indel frequency of less than 1% in a population of target cells. In some embodiments, the prime editing methods disclosed herein have an editing efficiency of at least about 5% and an indel frequency of less than 0.5% in a population of target cells. In some embodiments, the prime editing methods disclosed herein have an editing efficiency of at least about 5% and an indel frequency of less than 0.1% in a population of target cells.

[0376] In some embodiments, the prime editing methods disclosed herein have an editing efficiency of at least about 7.5% and an indel frequency of less than 10% in a population of target cells. In some embodiments, the prime editing methods disclosed herein have an editing efficiency of at least about 7.5% and an indel frequency of less than 7.5% in a population of target cells. In some embodiments, the prime editing methods disclosed herein have an editing efficiency of at least about 7.5% and an indel frequency of less than 5% in a population of target cells. In some embodiments, the prime editing methods disclosed herein have an editing efficiency of at least about 7.5% and an indel frequency of less than 2.5% in a population of target cells. In some embodiments, the prime editing methods disclosed herein have an editing efficiency of at least about 7.5% and an indel frequency of less than 1% in a population of target cells. In some embodiments, the prime editing methods disclosed herein have an editing efficiency of at least about 7.5% and an indel frequency of less than 0.5% in a population of target cells. In some embodiments, the prime editing methods disclosed herein have an editing efficiency of at least about 7.5% and an indel frequency of less than 0.1% in a population of target cells.

[0377] In some embodiments, the prime editing methods disclosed herein have an editing efficiency of at least about 10% and an indel frequency of less than 10% in a population of target cells. In some embodiments, the prime editing methods disclosed herein have an editing efficiency of at least about 10% and an indel frequency of less than 7.5% in a population of target cells. In some embodiments, the prime editing methods disclosed herein have an editing efficiency of at least about 10% and an indel frequency of less than 5% in a population of target cells. In some embodiments, the prime editing methods disclosed herein have an editing efficiency of at least about 10% and an indel frequency of less than 2.5% in a population of target cells. In some embodiments, the prime editing methods disclosed herein have an editing efficiency of at least about 10% and an indel frequency of less than 1% in a population of target cells. In some embodiments, the prime editing methods disclosed herein have an editing efficiency of at least about 10% and an indel frequency of less than 0.5% in a population of target cells. In some embodiments, the prime editing methods disclosed herein have an editing efficiency of at least about 10% and an indel frequency of less than 0.1% in a population of target cells.

[0378] In some embodiments, the prime editing methods disclosed herein have an editing efficiency of at least about 15% and an indel frequency of less than 10% in a population of target cells. In some embodiments, the prime editing methods disclosed herein have an editing efficiency of at least about 15% and an indel frequency of less than 7.5% in a population of target cells. In some embodiments, the prime editing methods disclosed herein have an editing efficiency of at least about 15% and an indel frequency of less than 5% in a population of target cells. In some embodiments, the prime editing methods disclosed herein have an editing efficiency of at least about 15% and an indel frequency of less than 2.5% in a population of target cells. In some embodiments, the prime editing methods disclosed herein have an editing efficiency of at least about 15% and an indel frequency of less than 1% in a population of target cells. In some embodiments, the prime editing methods disclosed herein have an editing efficiency of at least about 15% and an indel frequency of less than 0.5% in a population of target cells. In some embodiments, the prime editing methods disclosed herein have an editing efficiency of at least about 15% and an indel frequency of less than 0.1% in a population of target cells.

[0379] In some embodiments, the prime editing methods disclosed herein have an editing efficiency of at least about 15% and an indel frequency of less than 10% in a population of target cells. In some embodiments, the prime editing methods disclosed herein have an editing efficiency of at least about 15% and an indel frequency of less than 7.5% in a population of target cells. In some embodiments, the prime editing methods disclosed herein have an editing efficiency of at least about 15% and an indel frequency of less than 5% in a population of target cells. In some embodiments, the prime editing methods disclosed herein have an editing efficiency of at least about 15% and an indel frequency of less than 2.5% in a population of target cells. In some embodiments, the prime editing methods disclosed herein have an editing efficiency of at least about 20% and an indel frequency of less than 1% in a population of target cells. In some embodiments, the prime editing methods disclosed herein have an editing efficiency of at least about 20% and an indel frequency of less than 0.5% in a population of target cells. In some embodiments, the prime editing methods disclosed herein have an editing efficiency of at least about 20% and an indel frequency of less than 0.1% in a population of target cells.

[0380] In some embodiments, the prime editing methods disclosed herein have an editing efficiency of at least about 30% and an indel frequency of less than 10% in a population of target cells. In some embodiments, the prime editing methods disclosed herein have an editing efficiency of at least about 30% and an indel frequency of less than 7.5% in a population of target cells. In some embodiments, the prime editing methods disclosed herein have an editing efficiency of at least about 30% and an indel frequency of less than 5% in a population of target cells. In some embodiments, the prime editing methods disclosed herein have an editing efficiency of at least about 30% and an indel frequency of less than 2.5% in a population of target cells. In some embodiments, the prime editing methods disclosed herein have an editing efficiency of at least about 30% and an indel frequency of less than 1% in a population of target cells. In some embodiments, the prime editing methods disclosed herein have an editing efficiency of at least about 30% and an indel frequency of less than 0.5% in a population of target cells. In some embodiments, the prime editing methods disclosed herein have an editing efficiency of at least about 30% and an indel frequency of less than 0.1% in a population of target cells.

[0381] In some embodiments, the prime editing methods disclosed herein have an editing efficiency of at least about 40% and an indel frequency of less than 10% in a population of target cells. In some embodiments, the prime editing methods disclosed herein have an editing efficiency of at least about 40% and an indel frequency of less than 7.5% in a population of target cells. In some embodiments, the prime editing methods disclosed herein have an editing efficiency of at least about 40% and an indel frequency of less than 5% in a population of target cells. In some embodiments, the prime editing methods disclosed herein have an editing efficiency of at least about 40% and an indel frequency of less than 2.5% in a population of target cells. In some embodiments, the prime editing methods disclosed herein have an editing efficiency of at least about 40% and an indel frequency of less than 1% in a population of target cells. In some embodiments, the prime editing methods disclosed herein have an editing efficiency of at least about 40% and an indel frequency of less than 0.5% in a population of target cells. In some embodiments, the prime editing methods disclosed herein have an editing efficiency of at least about 40% and an indel frequency of less than 0.1% in a population of target cells.

[0382] In some embodiments, the prime editing methods disclosed herein have an editing efficiency of at least about 50% and an indel frequency of less than 10% in a population of target cells. In some embodiments, the prime editing methods disclosed herein have an editing efficiency of at least about 50% and an indel frequency of less than 7.5% in a population of target cells. In some embodiments, the prime editing methods disclosed herein have an editing efficiency of at least about 50% and an indel frequency of less than 5% in a population of target cells. In some embodiments, the prime editing methods disclosed herein have an editing efficiency of at least about 50% and an indel frequency of less than 2.5% in a population of target cells. In some embodiments, the prime editing methods disclosed herein have an editing efficiency of at least about 50% and an indel frequency of less than 1% in a population of target cells. In some embodiments, the prime editing methods disclosed herein have an editing efficiency of at least about 50% and an indel frequency of less than 0.5% in a population of target cells. In some embodiments, the prime editing methods disclosed herein have an editing efficiency of at least about 50% and an indel frequency of less than 0.1% in a population of target cells.

[0383] In some embodiments, the prime editing methods disclosed herein have an editing efficiency of at least about 60% and an indel frequency of less than 10% in a population of target cells. In some embodiments, the prime editing methods disclosed herein have an editing efficiency of at least about 60% and an indel frequency of less than 7.5% in a population of target cells. In some embodiments, the prime editing methods disclosed herein have an editing efficiency of at least about 60% and an indel frequency of less than 5% in a population of target cells. In some embodiments, the prime editing methods disclosed herein have an editing efficiency of at least about 60% and an indel frequency of less than 2.5% in a population of target cells. In some embodiments, the prime editing methods disclosed herein have an editing efficiency of at least about 60% and an indel frequency of less than 1% in a population of target cells. In some embodiments, the prime editing methods disclosed herein have an editing efficiency of at least about 60% and an indel frequency of less than 0.5% in a population of target cells. In some embodiments, the prime editing methods disclosed herein have an editing efficiency of at least about 60% and an indel frequency of less than 0.1% in a population of target cells.

[0384] In some embodiments, the prime editing methods disclosed herein have an editing efficiency of at least about 70% and an indel frequency of less than 10% in a population of target cells. In some embodiments, the prime editing methods disclosed herein have an editing efficiency of at least about 70% and an indel frequency of less than 7.5% in a population of target cells. In some embodiments, the prime editing methods disclosed herein have an editing efficiency of at least about 70% and an indel frequency of less than 5% in a population of target cells. In some embodiments, the prime editing methods disclosed herein have an editing efficiency of at least about 70% and an indel frequency of less than 2.5% in a population of target cells. In some embodiments, the prime editing methods disclosed herein have an editing efficiency of at least about 70% and an indel frequency of less than 1% in a population of target cells. In some embodiments, the prime editing methods disclosed herein have an editing efficiency of at least about 70% and an indel frequency of less than 0.5% in a population of target cells. In some embodiments, the prime editing methods disclosed herein have an editing efficiency of at least about 70% and an indel frequency of less than 0.1% in a population of target cells.

[0385] In some embodiments, the prime editing methods disclosed herein have an editing efficiency of at least about 80% and an indel frequency of less than 10% in a population of target cells. In some embodiments, the prime editing methods disclosed herein have an editing efficiency of at least about 80% and an indel frequency of less than 7.5% in a population of target cells. In some embodiments, the prime editing methods disclosed herein have an editing efficiency of at least about 80% and an indel frequency of less than 5% in a population of target cells. In some embodiments, the prime editing methods disclosed herein have an editing efficiency of at least about 80% and an indel frequency of less than 2.5% in a population of target cells. In some embodiments, the prime editing methods disclosed herein have an editing efficiency of at least about 80% and an indel frequency of less than 1% in a population of target cells. In some embodiments, the prime editing methods disclosed herein have an editing efficiency of at least about 80% and an indel frequency of less than 0.5% in a population of target cells. In some embodiments, the prime editing methods disclosed herein have an editing efficiency of at least about 80% and an indel frequency of less than 0.1% in a population of target cells.

[0386] In some embodiments, the prime editing methods disclosed herein have an editing efficiency of at least about 90% and an indel frequency of less than 10% in a population of target cells. In some embodiments, the prime editing methods disclosed herein have an editing efficiency of at least about 90% and an indel frequency of less than 7.5% in a population of target cells. In some embodiments, the prime editing methods disclosed herein have an editing efficiency of at least about 90% and an indel frequency of less than 5% in a population of target cells. In some embodiments, the prime editing methods disclosed herein have an editing efficiency of at least about 90% and an indel frequency of less than 2.5% in a population of target cells. In some embodiments, the prime editing methods disclosed herein have an editing efficiency of at least about 90% and an indel frequency of less than 1% in a population of target cells. In some embodiments, the prime editing methods disclosed herein have an editing efficiency of at least about 90% and an indel frequency of less than 0.5% in a population of target cells. In some embodiments, the prime editing methods disclosed herein have an editing efficiency of at least about 90% and an indel frequency of less than 0.1% in a population of target cells.

[0387] In some embodiments, the prime editing methods disclosed herein have an editing efficiency of at least about 95% and an indel frequency of less than 10% in a population of target cells. In some embodiments, the prime editing methods disclosed herein have an editing efficiency of at least about 95% and an indel frequency of less than 7.5% in a population of target cells. In some embodiments, the prime editing methods disclosed herein have an editing efficiency of at least about 95% and an indel frequency of less than 5% in a population of target cells. In some embodiments, the prime editing methods disclosed herein have an editing efficiency of at least about 95% and an indel frequency of less than 2.5% in a population of target cells. In some embodiments, the prime editing methods disclosed herein have an editing efficiency of at least about 95% and an indel frequency of less than 1% as measured in a population of target cells. In some embodiments, the prime editing methods disclosed herein have an editing efficiency of at least about 95% and an indel frequency of less than 0.5% as measured in a population of target cells. In some embodiments, the prime editing methods disclosed herein have an editing efficiency of at least about 95% and an indel frequency of less than 0.1% as measured in a population of target cells. In some embodiments, the prime editing methods disclosed herein have an editing efficiency of at least about 90% and an indel frequency of less than 10% in a population of target cells. In some embodiments, the prime editing methods disclosed herein have an editing efficiency of at least about 90% and an indel frequency of less than 7.5% in a population of target cells. In some embodiments, the prime editing methods disclosed herein have an editing efficiency of at least about 90% and an indel frequency of less than 5% in a population of target cells. In some embodiments, the prime editing methods disclosed herein have an editing efficiency of at least about 90% and an indel frequency of less than 2.5% in a population of target cells. In some embodiments, the prime editing methods disclosed herein have an editing efficiency of at least about 90% and an indel frequency of less than 1% in a population of target cells. In some embodiments, the prime editing methods disclosed herein have an editing efficiency of at least about 90%. In some embodiments, the population of target cell comprises a population of human primary cells, human iPSCs, human fibroblast cells, or human photoreceptor cells.

[0388] In some embodiments, any number of indels is determined after at least 1 hour, at least 2 hours, at least 6 hours, at least 12 hours, at least 24 hours, at least 36 hours, at least 48 hours, at least 3 days, at least 4 days, at least 5 days, at least 7 days, at least 10 days, or at least 14 days of exposing a target gene (e.g., a RHO gene within the genome of a cell) to a prime editing composition. In some embodiments, the editing efficiency is determined after 1 hour, 2 hours, 6 hours, 12 hours, 24 hours, 36 hours, 48 hours, 3 days, 4 days, 5 days, 7 days, 10 days, or 14 days of exposing a target gene (e.g., a RHO gene within the genome of a cell) to a prime editing composition.

[0389] In some embodiments, the prime editing composition described herein result in less than 50%, less than 40%, less than 30%, less than 20%, less than 19%, less than 18%, less than 17%, less than 16%, less than 15%, less than 14%, less than 13%, less than 12%, less than 11%, less than 10%, less than 9%, less than 8%, less than 7%, less than 6%, less than 5%, less than 4%, less than 3%, less than 2%, less than 1%, less than 0.9%, less than 0.8%, less than 0.7% less than 0.6%, less than 0.5%, less than 0.4%, less than 0.3%, less than 0.2%, less than 0.1%, less than 0.09%, less than 0.08%, less than 0.07%, less than 0.06%, less than 0.05%, less than 0.04%, less than 0.03%, less than 0.02%, or less than 0.01% off-target editing in a chromosome that includes the target gene. In some embodiments, off-target editing is determined after at least 1 hour, at least 2 hours, at least 6 hours, at least 12 hours, at least 24 hours, at least 36 hours, at least 48 hours, at least 3 days, at least 4 days, at least 5 days, at least 7 days, at least 10 days, or at least 14 days of exposing a target gene (e.g., a nucleic acid within the genome of a cell) to a prime editing composition.

[0390] In some embodiments, the prime editing methods described herein result in less than 10%, less than 9%, less than 8%, less than 7%, less than 6%, less than 5%, less than 4%, less than 3%, less than 2%, less than 1%, or less than 0.5% large deletion in edited cells. In some embodiments, the prime editing methods described herein result in less than 4% large deletion in edited cells. In some embodiments, the prime editing methods described herein result in less than 3% large deletion in edited cells. In some embodiments, the prime editing methods described herein result in less than 2% large deletion in edited cells. In some embodiments, the prime editing methods described herein result in less than 1% large deletion in edited cells. In some embodiments, the prime editing methods described herein does not result in detectable level of large deletion in edited cells.

[0391] In some embodiments, the prime editing methods disclosed herein have an editing efficiency of at least about 90% and an indel frequency of less than 10% in a population of target cells. In some embodiments, the prime editing methods disclosed herein have an editing efficiency of at least about 90% and an indel frequency of less than 7.5% in a population of target cells. In some embodiments, the prime editing methods disclosed herein have an editing efficiency of at least about 90% and an indel frequency of less than 5% in a population of target cells. In some embodiments, the prime editing methods disclosed herein have an editing efficiency of at least about 90% and an indel frequency of less than 2.5% in a population of target cells. In some embodiments, the prime editing methods disclosed herein have an editing efficiency of at least about 90% and an indel frequency of less than 1% in a population of target cells. In some embodiments, the prime editing methods disclosed herein have an editing efficiency of at least about 90%. In some embodiments, the population of target cell comprises a population of human primary cells, human iPSCs, human fibroblast cells, or human photoreceptor cells.

[0392] In some embodiments, the prime editing compositions (e.g., PEgRNAs and prime editors as described herein) and prime editing methods disclosed herein can be used to edit a target RHO gene. In some embodiments, the target RHO gene comprises a mutation compared to a wild type RHO gene. In some embodiments, the mutation is associated with retinitis pigmentosa. In some embodiments, the target RHO gene comprises an editing target sequence that contains the mutation associated with retinitis pigmentosa. In some embodiments, the mutation is in a coding region of the target RHO gene. In some embodiments, the mutation is in an exon of the target RHO gene. In some embodiments, the prime editing method comprises contacting a target RHO gene with a prime editing composition comprising a prime editor, a PEgRNA, and/or a ngRNA. In some embodiments, contacting the target RHO gene with the prime editing composition results in incorporation of one or more intended nucleotide edits in the target RHO gene. In some embodiments, the incorporation is in a region of the target RHO gene that corresponds to an editing target sequence in the RHO gene. In some embodiments, the one or more intended nucleotide edits comprises a single nucleotide substitution, an insertion, a deletion, or any combination thereof, compared to the endogenous sequence of the target RHO gene. In some embodiments, incorporation of the one or more intended nucleotide edits results in replacement of one or more mutations with the corresponding sequence that encodes a wild type rhodopsin set forth in SEQ ID NO: 1933. In some embodiments, incorporation of the one or more intended nucleotide edits results in replacement of the one or more mutations with the corresponding sequence in a wild type RHO gene. In some embodiments, incorporation of the one more intended nucleotide edits results in correction of a mutation in the target RHO gene. In some embodiments, the target RHO gene comprises an editing target sequence that contains the mutation. In some embodiments, contacting the target RHO gene with the prime editing composition results in incorporation of one or more intended nucleotide edits in the target RHO gene, which corrects the mutation in the editing target sequence (or a double stranded region comprising the editing target sequence and the complementary sequence to the editing target sequence on a target strand) in the target RHO gene. In some embodiments, the mutation is in exon 1 of the target RHO gene. In some embodiments, the mutation results in a c.68C→A nucleotide substitution in the sequence encoding a rhodopsin protein and a P23H amino acid substitution in the rhodopsin protein. In some embodiments, the correction results in restoration of wild type expression, i.e., C at position 68 in the sequence encoding the rhodopsin protein, and thereby a restoration of wild type rhodopsin with a proline at position 23.

[0393] In some embodiments, the target RHO gene is in a target cell. Accordingly, in one aspect provided herein is a method of editing a target cell comprising a target RHO gene that encodes a polypeptide that comprises one or more mutations relative to a wild type RHO gene. In some embodiments, the methods of the present disclosure comprise introducing a prime editing composition comprising a PEgRNA, a prime editor polypeptide, and/or a ngRNA into the target cell that has the target RHO gene to edit the target RHO gene, thereby generating an edited cell. In some embodiments, the target cell is a mammalian cell. In some embodiments, the target cell is a human cell. In some embodiments, the target cell is a progenitor cell. In some embodiments, the target cell is a stem cell. In some embodiments, the cell is an embryonic stem cell. In some embodiments, the target cell is an induced pluripotent stem cell. In some embodiments, the target cell is an embryonic stem cell. In some embodiments, the target cell is a retinal progenitor cell. In some embodiments, the target cell is a retina precursor cell. In some embodiments, the target cell is a fibroblast. In some embodiments, the target cell is a human progenitor cell. In some embodiments, the target cell is a human stem cell. in some embodiments, the target cell is an induced human pluripotent stem cell. In some embodiments, the target cell is a human embryonic stem cell. In some embodiments, the target cell is a human retinal progenitor cell. In some embodiments, the target cell is a human retina precursor cell. In some embodiments, the target cell is a human fibroblast. In some embodiments, the target cell is a primary cell. In some embodiments, the target cell is a human primary cell. In some embodiments, the target cell is a retina cell. In some embodiments, the target cell is a photoreceptor. In some embodiments, the target cell is a rod cell. In some embodiments, the target cell is a cone cell. In some embodiments, the target cell is a human cell from a retina. In some embodiments, the target cell is a human photoreceptor. In some embodiments, the target cell is a human rod cell. In some embodiments, the target cell is a human cone cell. In some embodiments, the target cell is a primary human photoreceptor derived from an induced human pluripotent stem cell (iPSC).

[0394] In some embodiments, components of a prime editing composition described herein are provided to a target cell in vitro. In some embodiments, components of a prime editing composition described herein are provided to a target cell ex vivo. In some embodiments, components of a prime editing composition described herein are provided to a target cell in vivo. In some embodiments, the cell edited by prime editing can be differentiated into, or give rise to recovery of a population of cells. In some embodiments, the target cell is an ex vivo cell. In some embodiments, the target cell is an ex vivo cell obtained from a human subject. In some embodiments, the target cell is in a subject, e.g., a human subject.

[0395] In some embodiments, incorporation of the one or more intended nucleotide edits in the target RHO gene that comprises one or more mutations restores wild type expression and function of rhodopsin encoded by the RHO gene. In some embodiments, the target RIO gene encodes a P23H amino acid substitution as compared to the wild type rhodopsin RHO protein prior to incorporation of the one or more intended nucleotide edits. In some embodiments, expression and/or function of rhodopsin may be measured when expressed in a target cell. In some embodiments, incorporation of the one or more intended nucleotide edits in the target RHO gene comprising one or more mutations lead to a fold change in a level of RHO gene expression, rhodopsin expression, or a combination thereof. In some embodiments, a change in the level of RHO expression can comprise a fold change of e.g., 2-fold, 3-fold, 4-fold, 5-fold, 6-fold, 7-fold, 8-fold, 9-fold, 10-fold, 15-fold, 20-fold, 25-fold, 30-fold, 40-fold, 50-fold, 60-fold, 70-fold, 80-fold, 90-fold, 100-fold or greater as compared to expression in a suitable control cell not introduced with a prime editing composition described herein. In some embodiments, incorporation of the one or more intended nucleotide edits in the target RHO gene that comprises one or more mutations restores wild type expression of rhodopsin by at least 10%, 20%, 30%, 40%, 50%, 60%, 70%, 80%, 90%, 95%, 99% or more as compared to wild type expression of the RIO protein in a suitable control cell that comprises a wild type RHO gene.

[0396] In some embodiments, a rhodopsin expression increase can be measured by a rhodopsin functional assay. In some embodiments, protein expression can be measured using a protein assay. In some embodiments, protein expression can be measured using antibody testing. In some embodiments, an antibody can comprise anti-rhodopsin. In some embodiments, protein expression can be measured using ELISA, mass spectrometry, Western blot, sodium dodecyl sulfate polyacrylamide gel electrophoresis (SDS-PAGE), high performance liquid chromatography (HPLC), electrophoresis, or any combination thereof. In some embodiments, a protein assay can comprise SDS-PAGE and densitometric analysis of a Coomassie Blue-stained gel. In some embodiments, wild-type rhodopsin level or P2311 mutant correction can be measured by measuring cell apoptosis and/or nucleosome release, as described in Gorbatyuk et al., https://doi.org/10.1073/pnas.0911991107 or by P23H misfolded mutant localization, as described in Gragg et al., https://dx.doi.org/10.1016%2Fj.bbadis.2018.06.004 or in Feng et al., https://dx.doi.org/10.3791%2F58703.

### Methods of Treating Retinitis Pigmentosa

[0397] In some embodiments, provided herein are methods for treatment of a subject diagnosed with a disease associated with or caused by one or more pathogenic mutations. In some embodiments, provided herein are methods for treatment of a subject diagnosed with a disease associated with or caused by one or more pathogenic mutations that can be corrected by prime editing. In some embodiments, methods of treatment provided herein comprises editing one or more genes other than the gene that harbors the one or more pathogenic mutations. In some embodiments, provided herein are methods for treating Retinitis pigmentosa that comprise administering to a subject a therapeutically effective amount of a prime editing composition, or a pharmaceutical composition comprising a prime editing composition as described herein. In some embodiments, administration of the prime editing composition results in incorporation of one or more intended nucleotide edits in the target gene in the subject. In some embodiments, administration of the prime editing composition results in correction of one or more pathogenic mutations, e.g., point mutations, insertions, or deletions, associated with Retinitis pigmentosa in the subject. In some embodiments, the target gene comprise an editing target sequence that contains the pathogenic mutation. In some embodiments, administration of the prime editing composition results in incorporation of one or more intended nucleotide edits in the target gene that corrects the pathogenic mutation in the editing target sequence (or a double stranded region comprising the editing target sequence and the complementary sequence to the editing target sequence on a target strand) of the target gene in the subject.

[0398] In some embodiments, the method provided herein comprises administering to a subject an effective amount of a prime editing composition, for example, a PEgRNA, a prime editor, and/or a ngRNA. In some embodiments, the method comprises administering to the subject an effective amount of a prime editing composition described herein, for example, polynucleotides, vectors, or constructs that encode prime editing composition components, or RNPs, LNPs, and/or polypeptides comprising prime editing composition components. Prime editing compositions can be administered to target the RHO gene in a subject, e.g., a human subject, suffering from, having, susceptible to, or at risk for Retinitis pigmentosa. Identifying a subject in need of such treatment can be in the judgment of a subject or a health care professional and can be subjective (e.g., opinion) or objective (e.g., measurable by a test or diagnostic method). In some embodiments, the subject has Retinitis pigmentosa.

[0399] In some embodiments, the subject has been diagnosed with retinitis pigmentosa by sequencing of a RHO gene in the subject. In some embodiments, the subject comprises at least a copy of RHO gene that comprises one or more mutations compared to a wild type RHO gene. In some embodiments, the subject comprises at least a copy of RHO gene that comprises a mutation in a coding region of the RHO gene. In some embodiments, the subject comprises at least a copy of RHO gene that comprises a mutation in exon 1, as compared to a wild type RHO gene. In some embodiments, the subject comprises at least a copy of RHO gene that comprises mutation P231H of the RHO gene as compared to a wild type RHO gene.

[0400] In some embodiments, the method comprises directly administering prime editing compositions provided herein to a subject. The prime editing compositions described herein can be delivered with in any form as described herein, e.g., as LNPs, RNPs, polynucleotide vectors such as viral vectors, or mRNAs. The prime editing compositions can be formulated with any pharmaceutically acceptable carrier described herein or known in the art for administering directly to a subject. Components of a prime editing composition or a pharmaceutical composition thereof may be administered to the subject simultaneously or sequentially. For example, in some embodiments, the method comprises administering a prime editing composition, or pharmaceutical composition thereof, comprising a complex that comprises a prime editor fusion protein and a PEgRNA and/or a ngRNA, to a subject. In some embodiments, the method comprises administering a polynucleotide or vector encoding a prime editor to a subject simultaneously with a PEgRNA and/or a ngRNA. In some embodiments, the method comprises administering a polynucleotide or vector encoding a prime editor to a subject before administration with a PEgRNA and/or a ngRNA.

[0401] In some embodiments, a population of patients each having one or more mutations in the RHO gene may be treated with a prime editing composition (e.g., a PEgRNA, a prime editor, and optionally an ngRNA as described herein) disclosed herein.

[0402] In some embodiments, a patient with multiple mutations in the RHO gene can be treated with a prime editing composition (e.g., a PEgRNAs, a prime editor, and optionally an ngRNA as described herein). For example, in some embodiments, a subject may comprise two copies of the gene, each comprising one or more different mutations. In some embodiments, a patient with one or more different mutations in the target gene can be treated with a prime editing composition comprising a PEgRNAs, a prime editor, and optionally an ngRNA. In some embodiments, the editing template may comprise one or more synonymous mutations relative to the wild-type RHO gene. Such synonymous mutations may include, for example, mutations that decrease the ability of a PEgRNA to rebind to the same target sequence once the desired edit is installed in the genome (e.g., synonymous mutations that silence the endogenous PAM sequence or that edit the endogenous protospacer). Accordingly, one or more synonymous mutations may include a PAM silencing edit.

[0403] Suitable routes of administrating the prime editing compositions to a subject include, without limitation: topical, subcutaneous, transdermal, intradermal, intralesional, intraarticular, intraperitoneal, intravesical, transmucosal, gingival, intradental, intracochlear, transtympanic, intraorgan, epidural, intrathecal, intramuscular, intravenous, intravascular, intraosseous, periocular, intratumoral, intracerebral, and intracerebroventricular administration. In some embodiments, the compositions described are administered intraperitoneally, intravenously, or by direct injection or direct infusion. In some embodiments, the compositions described are administered by direct injection or infusion into a subject. In some embodiments, the compositions described herein are administered by direct injection. In some embodiments, the compositions described herein are administered by subretinal injection. In some embodiments, the compositions described herein are administered by injection to the fovea or parafoveal regions. In some embodiments, the compositions described herein are administered by injection to peripheral regions of the retina. In some embodiments, the compositions described herein are administered by injection through the round window. In some embodiments, the compositions described herein are administered to the retina. In some embodiments, the compositions described herein are administered to a subject by injection, by means of a catheter, by means of a suppository, or by means of an implant.

[0404] In some embodiments, the method comprises administering cells edited with a prime editing composition described herein to a subject. In some embodiments, the cells are allogeneic. In some embodiments, allogeneic cells are or have been contacted ex vivo with a prime editing composition or pharmaceutical composition thereof and are introduced into a human subject in need thereof. In some embodiments, the cells are autologous to the subject. In some embodiments, cells are removed from a subject and contacted ex vivo with a prime editing composition or pharmaceutical composition thereof and are re-introduced into the subject.

[0405] In some embodiments, cells are contacted ex vivo with one or more components of a prime editing composition. In some embodiments, the ex vivo-contacted cells are introduced into the subject, and the subject is administered in vivo with one or more components of a prime editing composition. For example, in some embodiments, cells are contacted ex vivo with a prime editor and introduced into a subject. In some embodiments, the subject is then administered with a PEgRNA and/or a ngRNA, or a polynucleotide encoding the PEgRNA and/or the ngRNA.

[0406] In some embodiments, cells contacted with the prime editing composition are determined for incorporation of the one or more intended nucleotide edits in the genome before re-introduction into the subject. In some embodiments, the cells are enriched for incorporation of the one or more intended nucleotide edits in the genome before re-introduction into the subject. In some embodiments, the edited cells are primary cells. In some embodiments, the edited cells are progenitor cells. In some embodiments, the edited cells are stem cells. In some embodiments, the edited cells are induced pluripotent stem cells. In some embodiments, the edited cells are primary human cells. In some embodiments, the edited cells are human progenitor cells. In some embodiments, the edited cells are human stem cells. In some embodiments, the edited cells are human induced pluripotent stem cells. In some embodiments, the cell is a neuron. In some embodiments, the cell is a neuron from basal ganglia. In some embodiments, the cell is a neuron from basal ganglia of a subject. In some embodiments, the cell is a neuron in the basal ganglia of a subject. In some embodiments, the edited cells are retinal cells. In some embodiments, the edited cells are photoreceptor cells. In some embodiments, the edited cells are rod cells. In some embodiments, the edited cells are cone cells. In some embodiments, the edited cells are an ex vivo cells. In some embodiments, the edited cells are an ex vivo cells obtained from a human subject. In some embodiments, the edited cells are in a subject, e.g., a human subject. The prime editing composition or components thereof may be introduced into a cell by any delivery approaches as described herein, including LNP administration, RNP administration, electroporation, nucleofection, transfection, viral transduction, microinjection, cell membrane disruption and diffusion, or any other approach known in the art.

[0407] The cells edited with prime editing can be introduced into the subject by any route known in the art. In some embodiments, the edited cells are administered to a subject by direct infusion. In some embodiments, the edited cells are administered to a subject by intravenous infusion. In some embodiments, the edited cells are administered to a subject as implants.

[0408] The pharmaceutical compositions, prime editing compositions, and cells, as described herein, can be administered in effective amounts. In some embodiments, the effective amount depends upon the mode of administration. In some embodiments, the effective amount depends upon the stage of the condition, the age and physical condition of the subject, the nature of concurrent therapy, if any, and like factors well-known to the medical practitioner.

[0409] The specific dose administered can be a uniform dose for each subject. Alternatively, a subject's dose can be tailored to the approximate body weight of the subject. Other factors in determining the appropriate dosage can include the disease or condition to be treated or prevented, the severity of the disease, the route of administration, and the age, sex and medical condition of the patient.

[0410] In embodiments wherein components of a prime editing composition are administered sequentially, the time between sequential administration can be at least 1 hour, at least 2 hours, at least 6 hours, at least 12 hours, at least 24 hours, at least 36 hours, at least 48 hours, at least 3 days, at least 4 days, at least 5 days, at least 7 days, at least 10 days, or at least 14 days.

[0411] In some embodiments, a method of monitoring treatment progress is provided. In some embodiments, the method includes the step of determining a level of diagnostic marker, for example, correction of a mutation in RHO gene, or diagnostic measurement associated with retinitis pigmentosa, in a subject suffering from retinitis pigmentosa symptoms and has been administered an effective amount of a prime editing composition described herein. The level of the diagnostic marker determined in the method can be compared to known levels of the marker in either healthy normal controls or in other afflicted subjects to establish the subject's disease status.

### Delivery

[0412] Prime editing compositions described herein can be delivered to a cellular environment with any approach known in the art. Components of a prime editing composition can be delivered to a cell by the same mode or different modes. For example, in some embodiments, a prime editor can be delivered as a polypeptide or a polynucleotide (DNA or RNA) encoding the polypeptide. In some embodiments, a PEgRNA can be delivered directly as an RNA or as a DNA encoding the PEgRNA.

[0413] In some embodiments, a prime editing composition component is encoded by a polynucleotide, a vector, or a construct. In some embodiments, a prime editor polypeptide, a PEgRNA and/or a ngRNA is encoded by a polynucleotide. In some embodiments, the polynucleotide encodes a prime editor fusion protein comprising a DNA binding domain and a DNA polymerase domain. In some embodiments, the polynucleotide encodes a DNA polymerase domain of a prime editor. In some embodiments, the polynucleotide encodes a DNA polymerase domain of a prime editor. In some embodiments, the polynucleotide encodes a portion of a prime editor protein, for example, a N-terminal portion of a prime editor fusion protein connected to an intein-N. In some embodiments, the polynucleotide encodes a portion of a prime editor protein, for example, a C-terminal portion of a prime editor fusion protein connected to an intein-C. In some embodiments, the polynucleotide encodes a PEgRNA and/or a ngRNA. In some embodiments, the polypeptide encodes two or more components of a prime editing composition, for example, a prime editor fusion protein and a PEgRNA.

[0414] In some embodiments, the polynucleotide encoding one or more prime editing composition components is delivered to a target cell is integrated into the genome of the cell for long-term expression, for example, by a retroviral vector. In some embodiments, the polynucleotide delivered to a target cell is expressed transiently. For example, the polynucleotide may be delivered in the form of a mRNA, or a non-integrating vector (non-integrating virus, plasmids, minicircle DNAs) for episomal expression.

[0415] In some embodiments, a polynucleotide encoding one or more prime editing system components can be operably linked to a regulatory element, e.g., a transcriptional control element, such as a promoter. In some embodiments, the polynucleotide is operably linked to multiple control elements. Depending on the expression system utilized, any of a number of suitable transcription and translation control elements, including constitutive and inducible promoters, transcription enhancer elements, transcription terminators, etc. may be used in the expression vector (e.g., U6 promoter, H1 promoter).

[0416] In some embodiments, the polynucleotide encoding one or more prime editing composition components is a part of, or is encoded by, a vector. In some embodiments, the vector is a viral vector. In some embodiments, the vector is a non-viral vector.

[0417] Non-viral vector delivery systems can include DNA plasmids, RNA (e.g., a transcript of a vector described herein), naked nucleic acid, and nucleic acid complexed with a delivery vehicle, such as a liposome. In some embodiments, the polynucleotide is provided as an RNA, e.g., a mRNA or a transcript. Any RNA of the prime editing systems, for example a guide RNA or a base editor-encoding mRNA, can be delivered in the form of RNA. In some embodiments, one or more components of the prime editing system that are RNAs is produced by direct chemical synthesis or may be transcribed in vitro from a DNA. In some embodiments, a mRNA that encodes a prime editor polypeptide is generated using in vitro transcription. Guide polynucleotides (e.g., PEgRNA or ngRNA) can also be transcribed using in vitro transcription from a cassette containing a T7 promoter, followed by the sequence “GG”, and guide polynucleotide sequence. In some embodiments, the prime editor encoding mRNA, PEgRNA, and/or ngRNA are synthesized in vitro using an RNA polymerase enzyme (e.g., T7 polymerase, T3 polymerase, SP6 polymerase, etc.). Once synthesized, the RNA can directly contact a target RHO gene or can be introduced into a cell using any suitable technique for introducing nucleic acids into cells (e.g., microinjection, electroporation, transfection). In some embodiments, the prime editor-coding sequences, the PEgRNAs, and/or the ngRNAs are modified to include one or more modified nucleoside e.g., using pseudo-U or 5-Methyl-C.

[0418] Methods of non-viral delivery of nucleic acids can include lipofection, electroporation, nucleofection, microinjection, biolistics, virosomes, liposomes, immunoliposomes, polycation or lipid:nucleic acid conjugates, nanoparticles, cell penetrating peptides and associated conjugated molecules and chemistry, naked DNA, artificial virions, cell membrane disruption by a microfluidics device, and agent-enhanced uptake of DNA. Cationic and neutral lipids that are suitable for efficient receptor-recognition lipofection of polynucleotides can be used. Delivery can be to cells (e.g., in vitro or ex vivo administration) or target tissues (e.g., in vivo administration). The preparation of lipid:nucleic acid complexes, including targeted liposomes such as immunolipid complexes, can be used.

[0419] Viral vector delivery systems can include DNA and RNA viruses, which can have either episomal or integrated genomes after delivery to the cell. RNA or DNA viral based systems can be used to target specific cells and trafficking the viral payload to an organelle of the cell. Viral vectors can be administered directly (in vivo) or they can be used to treat cells in vitro, and the modified cells can optionally be administered after delivery (ex vivo).

[0420] In some embodiments, the viral vector is a retroviral, lentiviral, adenoviral, adeno-associated viral or herpes simplex viral vector. Retroviral vectors can include those based upon murine leukemia virus (MuLV), gibbon ape leukemia virus (GaLV), simian immunodeficiency virus (SIV), human immunodeficiency virus (HIV), and combinations thereof. In some embodiments, the retroviral vector is a lentiviral vector. In some embodiments, the retroviral vector is a gamma retroviral vector. In some embodiments, the viral vector is an adenoviral vector. In some embodiments, the viral vector is an adeno-associated virus (“AAV”) vector.

[0421] In some embodiments, polynucleotides encoding one or more prime editing composition components are packaged in a virus particle. Packaging cells can be used to form virus particles that can infect a target cell. Such cells can include 293 cells, (e.g., for packaging adenovirus), and ψ2 cells or PA317 cells (e.g., for packaging retrovirus). Viral vectors can be generated by producing a cell line that packages a nucleic acid vector into a viral particle. The vectors can contain the minimal viral sequences required for packaging and subsequent integration into a host. The vectors can contain other viral sequences being replaced by an expression cassette for the polynucleotide(s) to be expressed. The missing viral functions can be supplied in trans by the packaging cell line. For example, AAV vectors can comprise ITR sequences from the AAV genome which are required for packaging and integration into the host genome. In some embodiment, the polynucleotides are a DNA polynucleotide. In some embodiment, the polynucleotides are an RNA polynucleotide; e.g., an mRNA polynucleotide.

[0422] In some embodiments, the AAV vector is selected for tropism to a particular cell, tissue, organism. In some embodiments, the AAV vector is pseudotyped, e.g., AAV5/8. In some embodiments, polynucleotides encoding one or more prime editing composition components are packaged in a first AAV and a second AAV. In some embodiments, the polynucleotides encoding one or more prime editing composition components are packaged in a first rAAV and a second rAAV.

[0423] In some embodiments, dual AAV vectors are generated by splitting a large transgene expression cassette in two separate halves (5′ and 3′ ends that encode N-terminal portion and C-terminal portion of, e.g., a prime editor polypeptide), where each half of the cassette is no more than 5 kb in length, optionally no more than 4.7 kb in length, and is packaged in a single AAV vector. In some embodiments, the full-length transgene expression cassette is reassembled upon co-infection of the same cell by both dual AAV vectors. In some embodiments, a portion or fragment of a prime editor polypeptide, e.g., a Cas9 nickase, is fused to an intein. The portion or fragment of the polypeptide can be fused to the N-terminus or the C-terminus of the intein. In some embodiments, a N-terminal portion of the polypeptide is fused to an intein-N, and a C-terminal portion of the polypeptide is separately fused to an intein-C. In some embodiments, a portion or fragment of a prime editor fusion protein is fused to an intein and fused to an AAV capsid protein. In some embodiments, intein-N may be fused to the N-terminal portion of a first domain described herein, and intein-C may be fused to the C-terminal portion of a second domain described herein for the joining of the N-terminal portion to the C-terminal portion, thereby joining the first and second domains. In some embodiments, the first and second domains are each independently chosen from a DNA binding domain or a DNA polymerase domain. The intein, nuclease and capsid protein can be fused together in any arrangement (e.g., nuclease-intein-capsid, intein-nuclease-capsid capsid-intein-nuclease etc.). In some embodiments, a polynucleotide encoding a prime editor fusion protein is split in two separate halves, each encoding a portion of the prime editor fusion protein and separately fused to an intein. In some embodiments, each of the two halves of the polynucleotide is packaged in an individual AAV vector of a dual AAV vector system. In some embodiments, each of the two halves of the polynucleotide is no more than 5 kb in length, optionally no more than 4.7 kb in length. In some embodiments, the full-length prime editor fusion protein is reassembled upon co-infection of the same cell by both dual AAV vectors, expression of both halves of the prime editor fusion protein, and self-excision of the inteins. In some embodiments, the in vivo use of dual AAV vectors results in the expression of full-length full-length prime editor fusion proteins. In some embodiments, the use of the dual AAV vector platform allows viable delivery of transgenes of greater than about 4.5, 4.6, 4.7, 4.8, 4.9, or 5.0 kb in size.

[0424] In some embodiments, an intein is inserted at a splice site within a Cas protein. In some embodiments, insertion of an intein disrupts a Cas activity. As used herein, “intein” refers to a self-splicing protein intron (e.g., peptide), e.g., which ligates flanking N-terminal and C-terminal exteins (e.g., fragments to be joined). In some embodiments, an intein may comprise a polypeptide that is able to excise itself and join exteins with a peptide bond (e.g., protein splicing). In some embodiments, an intein of a precursor gene comes from two genes (e.g., split intein). In some embodiments, an intein may be a synthetic intein. Non-limiting examples of intein pairs that may be used in accordance with the present disclosure include: dnaE-n and dnaE-c. a 4-hydroxytamoxifen (4-HT)-responsive intein, an iCas molecule, a Ssp DnaX intein, Ter DnaE3 intein, Ter ThyX intein, Rma DnaB intein, Cfa DnaE intein, Ssp GyrB intein, and Rma DnaB intein. In some embodiments, intein fragments may be fused to the N terminal and C-terminal portion of a split Cas protein respectively for joining the fragments of split Cas9.

[0425] In some embodiments, the split Cas9 system may be used in general to bypass the packing limit of the viral delivery vehicles. In some embodiments, a split Cas9 may be a Type II CRISPR system Cas9. In some embodiments, a first nucleic acid encodes a first portion of the Cas9 protein having a first split-intein and wherein the second nucleic acid encodes a second portion of the Cas9 protein having a second split-intein complementary to the first split-intein and wherein the first portion of the Cas9 protein and the second portion of the Cas9 protein are joined together to form the Cas9 protein. In some embodiments, the first portion of the Cas9 protein is the N-terminal fragment of the Cas9 protein and the second portion of the Cas9 protein is the C-terminal fragment of the Cas9 protein. In some embodiments, a split site may be selected which are surface exposed due to the sterical need for protein splicing.

[0426] In some embodiments, a Cas protein may be split into two fragments at any C, T, A, or S. In some embodiments, a Cas9 may be intein split at residues 203-204, 280-292, 292-364, 311-325, 417-438, 445-483, 468-469, 481-502, 513-520, 522-530, 565-637, 696-707, 713-714, 795-804, 803-810, 878-887, and 1153-1154. In some embodiments, protein is divided into two fragments at SpCas9 T310, T313, A456, S469, or C574. In some embodiments, split Cas9 fragments across different split pairs yield combinations that provided the complete polypeptide sequence activate gene expression even when fragments are partially redundant. In some embodiments, a functional Cas9 protein may be reconstituted from two inactive split-Cas9 peptides in the presence of gRNA by using a split-intein protein splicing strategy. In some embodiment, the split Cas9 fragments are fused to either a N-terminal intein fragment or a C-terminal intein fragment, which can associate with each other and catalytically splice the two split Cas9 fragments into a functional reconstituted Cas9 protein. In some embodiments, a split-Cas9 can be packaged into self-complementary AAV. In some embodiments, a split-Cas9 comprises a 2.5 kb and a 2.2 kb fragment of S. pyogenes Cas9 coding sequences.

[0427] In some embodiments, a split-Cas9 architecture reduces the length and/or size of the coding sequences of a viral vector, e.g., AAV.

[0428] A target cell can be transiently or non-transiently transfected with one or more vectors described herein. A cell can be transfected as it naturally occurs in a subject. A cell can be taken or derived from a subject and transfected. A cell can be derived from cells taken from a subject, such as a cell line. In some embodiments, a cell transfected with one or more vectors described herein can be used to establish a new cell line comprising one or more vector-derived sequences. In some embodiments, a cell transiently transfected with the compositions of the disclosure (such as by transient transfection of one or more vectors, or transfection with RNA), and modified through the activity of a prime editor, can be used to establish a new cell line comprising cells containing the modification but lacking any other exogenous sequence. Any suitable vector compatible with the host cell can be used with the methods of the disclosure. Non-limiting examples of vectors include pXT1, pSC5, pSVK3, pBPV, pMSG, and pSVLSV40.

[0429] In some embodiments, a prime editor protein can be provided to cells as a polypeptide. In some embodiments, the prime editor protein is fused to a polypeptide domain that increases solubility of the protein. In some embodiments, the prime editor protein is formulated to improve solubility of the protein.

[0430] In some embodiment, a prime editor polypeptide is fused to a polypeptide permeant domain to promote uptake by the cell. In some embodiments, the permeant domain is a including peptide, a peptidomimetic, or a non-peptide carrier. For example, a permeant peptide may be derived from the third alpha helix of Drosophila melanogaster transcription factor Antennapedia, referred to as penetratin, which comprises the amino acid sequence RQIKIWFQNRRMKWKK (SEQ ID NO: 1981). As another example, the permeant peptide can comprise the HIV-1 tat basic region amino acid sequence, which may include, for example, amino acids 49-57 of naturally-occurring tat protein. Other permeant domains can include poly-arginine motifs, for example, the region of amino acids 34-56 of HIV-1 rev protein, nona-arginine, and octa-arginine. The nona-arginine (R9) sequence can be used. The site at which the fusion can be made may be selected in order to optimize the biological activity, secretion or binding characteristics of the polypeptide.

[0431] In some embodiments, a prime editor polypeptide is produced in vitro or by host cells, and it may be further processed by unfolding, e.g., heat denaturation, DTT reduction, etc. and may be further refolded. In some embodiments, a prime editor polypeptide is prepared by in vitro synthesis. Various commercial synthetic apparatuses can be used. By using synthesizers, naturally occurring amino acids can be substituted with unnatural amino acids. In some embodiments, a prime editor polypeptide is isolated and purified in accordance with recombinant synthesis methods, for example, by expression in a host cell and the lysate purified using HPLC, exclusion chromatography, gel electrophoresis, affinity chromatography, or other purification technique.

[0432] In some embodiments, a prime editing composition, for example, prime editor polypeptide components and PEgRNA/ngRNA are introduced to a target cell by nanoparticles. In some embodiments, the prime editor polypeptide components and the PEgRNA and/or ngRNA form a complex in the nanoparticle. Any suitable nanoparticle design can be used to deliver genome editing system components or nucleic acids encoding such components. In some embodiments, the nanoparticle is inorganic. In some embodiments, the nanoparticle is organic. In some embodiments, a prime editing composition is delivered to a target cell, e.g., a hepatocyte, in an organic nanoparticle, e.g., a lipid nanoparticle (LNP) or polymer nanoparticle.

[0433] In some embodiments, LNPs are formulated from cationic, anionic, neutral lipids, or combinations thereof. In some embodiments, neutral lipids, such as the fusogenic phospholipid DOPE or the membrane component cholesterol, are included to enhance transfection activity and nanoparticle stability. In some embodiments, LNPs are formulated with hydrophobic lipids, hydrophilic lipids, or combinations thereof. Lipids may be formulated in a wide range of molar ratios to produce an LNP. Any lipid or combination of lipids that are known in the art can be used to produce an LNP. Exemplary lipids used to produce LNPs are provided in Table 18 below.

[0434] In some embodiments, components of a prime editing composition form a complex prior to delivery to a target cell. For example, a prime editor fusion protein, a PEgRNA, and/or a ngRNA can form a complex prior to delivery to the target cell. In some embodiments, a prime editing polypeptide (e.g., a prime editor fusion protein) and a guide polynucleotide (e.g., a PEgRNA or ngRNA) form a ribonucleoprotein (RNP) for delivery to a target cell. In some embodiments, the RNP comprises a prime editor fusion protein in complex with a PEgRNA. RNPs may be delivered to cells using known methods, such as electroporation, nucleofection, or cationic lipid-mediated methods, or any other approaches known in the art. In some embodiments, delivery of a prime editing composition or complex to the target cell does not require the delivery of foreign DNA into the cell. In some embodiments, the RNP comprising the prime editing complex is degraded over time in the target cell. Exemplary lipids for use in nanoparticle formulations and/or gene transfer are shown in Table 18 below.

TABLE 18
Exemplary lipids for nanoparticle formulation or gene transfer

| Lipid | Abbreviation | Feature |
|---|---|---|
| 1,2-Dioleoyl-sn-glycero-3-phosphatidylcholine | DOPC | Helper |
| 1,2-Dioleoyl-sn-glycero-3-phosphatidylethanolamine | DOPE | Helper |
| Cholesterol | | Helper |
| N41-(2,3-Dioleyloxy)prophyliN,N,N-trimethylammonium | DOTMA | Cationic |
| chloride | | |
| 1,2-Dioleoyloxy-3-trimethylammonium-propane | DOGS | Cationic |
| Dioctadecylamidoglycylspermine | | |
| N-(3-Aminopropy1)-N,N-dimethy1-2,3-bis(dodecyloxy)-1- | GAP-DLRIE | Cationic |
| propanaminium bromide | | |
| Cetyltrimethylammonium bromide | CTAB | Cationic |
| 6-Lauroxyhexyl omithinate | LHON | Cationic |
| 1-(2,3-Dioleoyloxypropy1)-2,4,6-trimethylpyridinium | 2Oc | Cationic |
| 2,3-Dioleyloxy-N-P(spenninecarboxamido-ethy1J-N,Ndimethyl- | DOSPA | Cationic |
| l-propanatninium trifluoroacetate | | |
| 1,2-Dioley1-3-trimethylamtnonium-propane | DOPA | Cationic |
| N-(2-Hydroxyethyl)-N,N-dimethy1-2,3-bis(tetradecyloxy)-1- | MDRIE | Cationic |
| propanaminium bromide | | |
| Dimyristooxypropyl dimethyl hydroxyethyl ammonium bromide | DMRI | Cationic |
| 3β-[N-(N′,N′-Dimethylaminoethane)-carbamoyl]cholesterol | DC-Chol | Cationic |
| Bis-guanidium-tren-cholesterol | BGTC | Cationic |
| 1,3-Diodeoxy-2-(6-carboxy-spermy1)-propylamide | DOSPER | Cationic |
| Dimethyloctadecylammonium bromide | DDAB | Cationic |
| Dioctadecylamidoglicylspermidin | DSL | Cationic |
| rac-[(2,3-Dioctadecyloxypropyl)(2-hydroxyethyl)]- | CLIP-1 | Cationic |
| dimethylammonium chloride | | |
| rac-[2(2,3-Dihexadecyloxypropyloxymethyloxy) | CLIP-6 | Cationic |
| ethyl]trimethylammoniun bromide | | |
| Ethyldimyristoylphosphatidylcholine | EDMPC | Cationic |
| 1,2-Distearyloxy-N,N-dimethyl-3-aminopropane | DSDMA | Cationic |
| 1,2-Dimyristoyl-trimethylammonium propane | DMTAP | Cationic |
| O,O′-Dimyristyl-N-lysyl aspartate | DMKE | Cationic |
| 1,2-Distearoyl-sn-glycero-3-ethylpho sphocholine | DSEPC | Cationic |
| N-Palmitoyl D-erythro-sphingosyl carbamoyl-spenmine | CCS | Cationic |
| N-t-Butyl-N0-tetradecyl-3-tetradecylaminopropionamidine | diC14-amidine | Cationic |
| Octadecenolyoxy[ethyl-2-heptadecenyl-3 hydroxyethyl] | DOTIM | Cationic |
| imidazolinium chloride | | |
| N1-Cholesteryloxycarbonyl-3,7-diazanonane-1,9-diamine | CDAN | Cationic |
| 2-(3-Bis(3-amino-propy1)-amino]propylamino)- | RPR209120 | Cationic |
| Nditetradecylcarbamoylme-ethyl-acetamide | | |
| 1,2-dilinoleyloxy-3-dimethylaminopropane | DLinDMA | Cationic |
| 2,2-dilinoley1-4-dimethylaminoethyl-[1,3]-dioxolane | DLin-KC2- | Cationic |
| | DMA | |
| dilinoleyl-methyl-4-dimethylaminobutyrate | DLin-MC3- | Cationic |
| | DMA | |

[0435] Exemplary polymers for use in nanoparticle formulations and/or gene transfer are shown in Table 19 below.

TABLE 19
Exemplary lipids for nanoparticle formulation or gene transfer

| Polymer | Abbreviation |
|---|---|
| Poly(ethylene)glycol | PEG |
| Polyethylenimine | PEI |
| Dithiobis (succinimidylpropionate) | DSP |
| Dimethyl-3,3′-dithiobispropionimidate | DTBP |
| Poly(ethylene imine)biscarbamate | PEIC |
| Poly(L-lysine) | PLL |
| Histidine modified PLL | |
| Poly(N-vinylpyrrolidone) | PVP |
| Poly(propylenimine) | PPI |
| Poly(amidoamine) | PAMAM |
| Poly(amidoethylenimine) | SS_PAEI |
| Triethylenetetramine | TETA |
| Poly(β-aminoester) | |
| Poly(4-hydroxy-L-proline ester) | PHP |
| Poly(allylamine) | |
| Poly(α-[4-aminobutyl]-L-glycolic acid) | PAGA |
| Poly(D,L-lactic-co-glycolic acid) | PLGA |
| Poly(N-ethyl-4-vinylpyridinium bromide) | |
| Poly(phosphazene)s | PPZ |
| Poly(phosphoester)s | PPE |
| Poly(phosphoramidate)s | PPA |
| Poly(N-2-hydroxypropylmethacrylamide) | pHPMA |
| Poly (2-(dimethylamino)ethyl methacrylate) | pDMAEMA |
| Poly(2-aminoethyl propylene phosphate) | PPE-EA |
| Chitosan | |
| Galactosylated chitosan | |
| N-dodacylated chitosam | |
| Histone | |
| Collagen | |
| Dextran-spermine | D-SPM |

[0436] Exemplary delivery methods for Polynucleotides encoding prime editing composition components are shown in Table 20 below.

TABLE 20
Exemplary polynucleotide delivery methods

| | | Delivery | | | |
|---|---|---|---|---|---|
| | | into Non- | | | Type of |
| | | Dividing | Duration of | Genome | Molecule |
| Delivery | Vector/Mode | Cells | Expression | Integration | Delivered |
| Physical | (e.g., | YES | Transient | NO | Nucleic |
| | electroporation, | | | | Acids and |
| | particle gun, | | | | Proteins |
| | Calcium phosphate | | | | |
| | transfection) | | | | |
| Viral | Retrovirus | NO | Stable | YES | RNA |
| | Lentivirus | YES | Stable | YES/NO with | RNA |
| | | | | modification | |
| | Adenovirus | YES | Transient | NO | DNA |
| | Adeno-Associated | YES | Stable | NO | DNA |
| | Virus (AAV) | | | | |
| | Vaccinia Virus | YES | Very | NO | DNA |
| | | | Transient | | |
| | Herpes Simplex | YES | Stable | NO | DNA |
| | Virus | | | | |
| Non-Viral | Cationic | YES | Transient | Depends on | Nucleic acids |
| | | | | what is | and Proteins |
| | | | | delivered | |
| | Polymeric | YES | Transient | NO | Nucleic |
| | Nanoparticles | | | | Acids |
| Biological | Attenuated | YES | Transient | NO | Nucleic |
| | Bacteria | | | | Acids |
| Non-Viral | Engineered | YES | Transient | NO | Nucleic |
| Delivery | Bacteriophages | | | | Acids |
| Vehicles | Mammalian Virus- | YES | Transient | NO | Nucleic |
| | like Particles | | | | Acids |
| | Biological | YES | Transient | NO | Nucleic |
| | liposomes: | | | | Acids |
| | Erythrocyte Ghosts | | | | |
| | and Exosomes | | | | |

[0437] The prime editing compositions of the disclosure, whether introduced as polynucleotides or polypeptides, can be provided to the cells for about 30 minutes to about 24 hours, e.g., 1 hour, 1.5 hours, 2 hours, 2.5 hours, 3 hours, 3.5 hours 4 hours, 5 hours, 6 hours, 7 hours, 8 hours, 12 hours, 16 hours, 18 hours, 20 hours, or any other period from about 30 minutes to about 24 hours, which can be repeated with a frequency of about every day to about every 4 days, e.g., every 1.5 days, every 2 days, every 3 days, or any other frequency from about every day to about every four days. The compositions may be provided to the subject cells one or more times, e.g., one time, twice, three times, or more than three times, and the cells allowed to incubate with the agent(s) for some amount of time following each contacting event e.g., 16-24 hours. In cases in which two or more different prime editing system components, e.g., two different polynucleotide constructs are provided to the cell (e.g., different components of the same prime editing system, or two different guide nucleic acids that are complementary to different sequences within the same or different target genes), the compositions may be delivered simultaneously (e.g., as two polypeptides and/or nucleic acids). Alternatively, they may be provided sequentially, e.g., one composition being provided first, followed by a second composition.

[0438] The prime editing compositions and pharmaceutical compositions of the disclosure, whether introduced as polynucleotides or polypeptides, can be administered to subjects in need thereof for about 30 minutes to about 24 hours, e.g., 1 hour, 1.5 hours, 2 hours, 2.5 hours, 3 hours, 3.5 hours 4 hours, 5 hours, 6 hours, 7 hours, 8 hours, 12 hours, 16 hours, 18 hours, 20 hours, or any other period from about 30 minutes to about 24 hours, which can be repeated with a frequency of about every day to about every 4 days, e.g., every 1.5 days, every 2 days, every 3 days, or any other frequency from about every day to about every four days. The compositions may be provided to the subject one or more times, e.g., one time, twice, three times, or more than three times. In cases in which two or more different prime editing system components, e.g., two different polynucleotide constructs are administered to the subject (e.g., different components of the same prime editing system, or two different guide nucleic acids that are complementary to different sequences within the same or different target genes), the compositions may be administered simultaneously (e.g., as two polypeptides and/or nucleic acids). Alternatively, they may be provided sequentially, e.g., one composition being provided first, followed by a second composition.

### EXAMPLES

### Example 1—General Methods

[0439] PEgRNA assembly: PEgRNA libraries may be assembled by one of three methods: in the first method, pooled synthesized DNA oligos encoding the PEgRNA and flanking U6 expression plasmid homology regions may be cloned into U6 expression plasmids via Gibson cloning and sequencing of bacterial colonies via Sanger or Next-generation sequencing. In the second method, double-stranded linear DNA fragments encoding PEgRNA and homology sequences as above may be individually Gibson-cloned into U6 expression plasmids. In the third method, for each PEgRNA, separate oligos encoding a protospacer, a gRNA scaffold, and PEgRNA extension (PBS and RTT) may be ligated, and then cloned into a U6 expression plasmid as described in Anzalone et al., Nature. 2019 December; 576(7785):149-157. Bacterial colonies carrying sequence-verified plasmids may be propagated in LB or TB. Plasmid DNA may be purified by minipreps for mammalian transfection.

[0440] PEgRNA may also be chemically synthesized. Such chemically synthesized PEgRNAs may be modified at the 5′ end and the 3′ end: the three 5′ most nucleotides may be modified to phosphorothioated 2′-O-methyl nucleotides. The three consecutive nucleotides that precedes the 3′ most nucleotide (i.e. three consecutive nucleotides immediately 5′ of the last nucleotide at the 3′ end) may also be modified to phosphorothioated 2′-O-methyl nucleotides.

[0441] HEK cell culture and transfection: HEK293T cells may be propagated in DMEM with 10% FBS. Prior to transfection, cells may be seeded in 96-well plates and then transfected with Lipofectamine 2000 or MessengerMax according to the manufacturer's directions with DNA or mRNA encoding a prime editor and PEgRNA (and ngRNA for PE3 experiments). Three days after transfection, gDNA may be harvested in lysis buffer for high throughput sequencing and may be sequenced using Miseq.

[0442] Lentiviral production and cell line generation—Generation of cells lines carrying a the RHO c.68C→A mutation (P23H) cassette: Lentiviral transfer plasmids containing the RHO c.68C→A mutation (P23H) with flanking sequences from the RHO gene on each side, and an IRES-Puromycin selection cassette, may be cloned behind an EF1α short promoter. HEK293T cells may be transiently transfected with the transfer plasmids and packaging plasmids containing VSV glycoprotein and lentiviral gag/pol coding sequences. After transfection, lentiviral particles may be harvested from the cell media and concentrated. HEK293T cells may be transduced using serial dilutions of the lentiviral particles described above. Cells generated at a dilution of MOI<1, as determined by survival following puromycin, are selected for expansion. A resulting HEK293T cell line carrying the c.68C→A mutation may be used to screen PEgRNAs.

[0443] Installation of N48K mutation by prime editing: Generation of cell lines carrying a RHO c.68C→A (P23H) mutation in the endogenous RHO gene: PEgRNAs for NGG PAM recognition may be designed to incorporate a RHO c.68C→A mutation (P23H) in the wild type endogenous RHO gene in HEK293T cells by prime editing as a proxy to examine editing efficiency.

[0444] A wild type HEK293T cell line may be expanded and transiently transfected with a nucleic acid encoding a prime editor and an P23H mutation installation PEgRNA in arrayed 96-well plates for assessment of editing by high-throughput sequencing. Prior to transfection, cells may be seeded in 96-well plates and then transfected with Lipofectamine 2000 or MessengerMax according to the manufacturer's directions with DNA or mRNA and PEgRNA. Three days after transfection, gDNA may be harvested in lysis buffer for high throughput sequencing, which may be sequenced using Miseq.

[0445] Retinitis pigmentosa mutation correction with PE2 system: A HEK293T cell line carrying the P23H mutation, such as one made by a method described above, may be expanded and transiently transfected with a PEgRNA and one or more nucleic acids encoding a prime editor in arrayed 96-well plates for assessment of editing by high-throughput sequencing. The PEgRNA may be any PEgRNA disclosed herein. The prime editor may be any prime editor comprising a Cas9 protein capable of recognizing the PAM associated with the spacer of the PEgRNA.

[0446] Retinitis pigmentosa mutation correction with PE3 system: a nick guide RNA (“ngRNA”) that is capable of directing the prime editor to generate a nick on the opposite strand compared to the PEgRNA (i.e., on the non-edit strand) may be included in the transfection mixture referenced above. Addition of a ngRNA may improve efficiency and/or fidelity of prime editing as discussed herein. The ngRNA may be any ngRNA disclosed herein. Preferred ngRNA include those that include a spacer associated with a PAM that is recognized by the Cas9 protein of the prime editor.

### Example 2—Spacer Screen

[0447] A screen was performed in HEK293T cells to identify active spacers associated with NGG and NGA PAMs within about 100 nucleotides of the c.68C→A mutation in the RHO gene. The spacers tested include potential PEgRNA spacers, potential ngRNA spacers, and spacers that can be used in both PEgRNA and ngRNA.

[0448] Briefly, one day prior to transfection, wildtype HEK293T cells were plated in a 96-well plate at a density of 10,000 cells per well. Before transfecting, cells were approximately 60-70% confluent. The cells were transfected with MessengerMax transfection cocktail containing an mRNA encoding a Cas9 protein capable of recognizing either an NGG or NGA spacer, and a sgRNA containing a test spacer. Three days post transfection, genomic DNA was harvested with QuickExtract Solution (Lucigen). Genomic DNA was sequenced by next generation sequencing and the number of indels in exon one of Rhodopsin are reported. The results for the NGG spacers are shown in Table 21. Although all spacers tested had activity, the NGG spacers were overall more active (data not shown) and only NGG spacers were selected for use in a PE2 screen for PEgRNA activity. The bolded spacers in Table 21 were selected for use in both PEgRNA and ngRNA; the remainder were used experimentally as ngRNA spacers.

TABLE 21
Spacer screen for NGG spacers near the c.68C→A (P23H) mutation in RHO

| | Nick-to-edit | |
|---|---|---|
| Spacer Sequence¹ | distance (nt) | % Indel |
| TTCTTGGGTGGGAGCAGCCA (SEQ ID NO: 80) | 96 | 35.70% |
| GCAGCCACGGGTCAGCCACA (SEQ ID NO: 77) | 83 | 51.00% |
| CAGCCACGGGTCAGCCACAA (SEQ ID NO: 74) | 82 | 58.45% |
| ACAAGGGCCACAGCCATGAA (SEQ ID NO: 72) | 66 | 52.31% |
| ACAGCCATGAATGGCACAGA (SEQ ID NO: 73) | 57 | 40.63% |
| CGTGCCCTTCTCCAATGCGA (SEQ ID NO: 75) | 22 | 33.90% |
| GTGCCCTTCTCCAATGCGAC (SEQ ID NO: 78) | 21 | 29.11% |
| CTTCTCCAATGCGACGGGTG (SEQ ID NO: 76) | 16 | 44.58% |
| AGTACTGTGGGTACTCGAAG (SEQ ID NO: 520) | 4 | 35.83% |
| GCTCAGCCAGGTAGTACTGT (SEQ ID NO: 4) | −16 | 44.58% |
| GGCTCAGCCAGGTAGTACTG (SEQ ID NO: 855) | −17 | 39.45% |
| AGAACTGCCATGGCTCAGCC (SEQ ID NO: 850) | −28 | 29.12% |
| GCCAGCATGGAGAACTGCCA (SEQ ID NO: 854) | −38 | 46.40% |
| AAACATGTAGGCGGCCAGCA (SEQ ID NO: 849) | −51 | 28.24% |
| GATCAGCAGAAACATGTAGG (SEQ ID NO: 853) | −60 | 46.80% |
| CACGATCAGCAGAAACATGT (SEQ ID NO: 852) | −63 | 44.23% |
| AGAGCGTGAGGAAGTTGATG (SEQ ID NO: 851) | −94 | 44.81% |
| TAGAGCGTGAGGAAGTTGAT (SEQ ID NO: 857) | −95 | 41.98% |
| GTAGAGCGTGAGGAAGTTGA (SEQ ID NO: 856) | −96 | 32.70% |
| GGACGGTGACGTAGAGCGTG (SEQ ID NO: 858) | −106 | 41.00% |

¹Indicated spacer sequence was used in a synthetic sgRNA having the following scaffold: GTTTTAGAGCTAGAAATAGCAAGTTAAAATAAGGCTAGTCCGTTATCAACTTGAAAAAGTGGCACCGAGTCGGTGC (SEQ ID NO: 1854). The experimental sequence further contained 3′ mT*mT*mT*T and 5′mN*mN*mN*N modifications, where m indicates that the nucleotide contains a 2′-O-Me modification, a * indicates a phosphorothioate bond, and a T indicates an additional T nucleotide added onto the end of the sequence.

### Example 3—Screening of PEgRNA for Editing of a Mutation Associated with Retinitis Pigmentosa

[0449] A screen was performed in an HEK293T cell line carrying a RHO c.68C→A mutation (P23H) in endogenous RHO gene that was generated in accordance with the methods in Example 1. The cell line was expanded and transiently transfected with mRNA encoding a Prime Editor fusion protein and a PEgRNA in arrayed 96-well plates for assessment of editing by high-throughput sequencing.

[0450] The PEgRNAs used in this experiment were chemically synthesized by Integrated DNA Technologies (IDT). Chemically synthesized PEgRNAs were modified at the 5′ end and the 3′ end: the three 5′ most nucleotides were modified to phosphorothioated 2′-O-methyl nucleotides. The three consecutive nucleotides that precedes the 3′ most nucleotide (i.e. three consecutive nucleotides immediately 5′ of the last nucleotide at the 3′ end) were also modified to phosphorothioated 2′-O-methyl nucleotides.

[0451] Briefly, one day prior to transfection, mutant HEK293T cells were plated in a 96-well plate at a density of 10,000 cells per well. Before transfecting, cells were approximately 60-70% confluent. The cells were transfected with MessengerMax transfection cocktail containing a test PEgRNA and an mRNA encoding a Prime Editing fusion protein. Three days post transfection, genomic DNA was harvested with QuickExtract Solution (Lucigen). Genomic DNA was sequenced by next generation sequencing and % correct edit at the mutation site is reported. The results are shown in Table 22.

[0452] In total, 111 PEgRNA were tested, each based on one of three NGG spacers selected from the spacer screen of Example 2. Each of the PEgRNA tested encoded for wild-type Rho sequence. The top performing PEgRNA were selected for further experimentation.

TABLE 22
Prime Editing at a c.68C−>A mutation site in the endogenous
RHO gene of HEK293T cells with a PEgRNA (PE2 system)

| PEgRNA¹ | Spacer | RTT | | PBS | | |
|---|---|---|---|---|---|---|
| Se- | Se- | Se- | | Se- | | |
| quence | quence | quence | RTT | quence | PBS | % |
| Number | Number | Number | Length | Number | Length | Edit |
| 1289 | 75 | 1224 | 26 | 1195 | 8 | 0.03% |
| 1293 | 75 | 1232 | 28 | 1195 | 8 | 0.03% |
| 1299 | 75 | 1240 | 30 | 1195 | 8 | 0.03% |
| 1305 | 75 | 1248 | 32 | 1195 | 8 | 0.03% |
| 1294 | 75 | 1224 | 26 | 1197 | 10 | 0.04% |
| 1300 | 75 | 1232 | 28 | 1197 | 10 | 0.05% |
| 1306 | 75 | 1240 | 30 | 1197 | 10 | 0.04% |
| 1311 | 75 | 1248 | 32 | 1197 | 10 | 0.05% |
| 1301 | 75 | 1224 | 26 | 1199 | 12 | 0.05% |
| 1307 | 75 | 1232 | 28 | 1199 | 12 | 0.03% |
| 1312 | 75 | 1240 | 30 | 1199 | 12 | 0.05% |
| 1315 | 75 | 1248 | 32 | 1199 | 12 | 0.03% |
| 1308 | 75 | 1224 | 26 | 1201 | 14 | 0.23% |
| 1313 | 75 | 1232 | 28 | 1201 | 14 | 0.18% |
| 1316 | 75 | 1240 | 30 | 1201 | 14 | 0.08% |
| 1317 | 75 | 1248 | 32 | 1201 | 14 | 0.05% |
| 1479 | 78 | 1460 | 25 | 1444 | 8 | 0.31% |
| 1484 | 78 | 1462 | 27 | 1444 | 8 | 0.14% |
| 1491 | 78 | 1464 | 29 | 1444 | 8 | 0.08% |
| 1498 | 78 | 1466 | 31 | 1444 | 8 | 0.07% |
| 1485 | 78 | 1460 | 25 | 1446 | 10 | 0.38% |
| 1492 | 78 | 1462 | 27 | 1446 | 10 | 0.21% |
| 1499 | 78 | 1464 | 29 | 1446 | 10 | 0.08% |
| 1505 | 78 | 1466 | 31 | 1446 | 10 | 0.10% |
| 1493 | 78 | 1460 | 25 | 1448 | 12 | 0.21% |
| 1500 | 78 | 1462 | 27 | 1448 | 12 | 0.31% |
| 1506 | 78 | 1464 | 29 | 1448 | 12 | 0.24% |
| 1509 | 78 | 1466 | 31 | 1448 | 12 | 0.15% |
| 1501 | 78 | 1460 | 25 | 1450 | 14 | 0.14% |
| 1507 | 78 | 1462 | 27 | 1450 | 14 | 0.17% |
| 1510 | 78 | 1464 | 29 | 1450 | 14 | 0.13% |
| 1511 | 78 | 1466 | 31 | 1450 | 14 | 0.12% |
| 894 | 76 | 766 | 20 | 737 | 8 | 0.79% |
| 915 | 76 | 774 | 22 | 737 | 8 | 0.84% |
| 939 | 76 | 782 | 24 | 737 | 8 | 0.50% |
| 959 | 76 | 790 | 26 | 737 | 8 | 0.51% |
| 916 | 76 | 766 | 20 | 739 | 10 | 0.50% |
| 940 | 76 | 774 | 22 | 739 | 10 | 0.47% |
| 960 | 76 | 782 | 24 | 739 | 10 | 0.38% |
| 972 | 76 | 790 | 26 | 739 | 10 | 0.35% |
| 941 | 76 | 766 | 20 | 741 | 12 | 0.33% |
| 961 | 76 | 774 | 22 | 741 | 12 | 0.27% |
| 973 | 76 | 782 | 24 | 741 | 12 | 0.21% |
| 978 | 76 | 790 | 26 | 741 | 12 | 0.27% |
| 962 | 76 | 766 | 20 | 743 | 14 | 0.11% |
| 974 | 76 | 774 | 22 | 743 | 14 | 0.11% |
| 979 | 76 | 782 | 24 | 743 | 14 | 0.06% |
| 983 | 76 | 790 | 26 | 743 | 14 | 0.11% |
| 1620 | 850 | 1560 | 32 | 1524 | 8 | 0.22% |
| 1624 | 850 | 1572 | 34 | 1524 | 8 | 0.17% |
| 1630 | 850 | 1584 | 36 | 1524 | 8 | 0.07% |
| 1636 | 850 | 1596 | 38 | 1524 | 8 | 0.05% |
| 1625 | 850 | 1560 | 32 | 1526 | 10 | 0.38% |
| 1631 | 850 | 1572 | 34 | 1526 | 10 | 0.19% |
| 1637 | 850 | 1584 | 36 | 1526 | 10 | 0.07% |
| 1642 | 850 | 1596 | 38 | 1526 | 10 | 0.06% |
| 1632 | 850 | 1560 | 32 | 1528 | 12 | 0.38% |
| 1638 | 850 | 1572 | 34 | 1528 | 12 | 0.16% |
| 1643 | 850 | 1584 | 36 | 1528 | 12 | 0.14% |
| 1645 | 850 | 1596 | 38 | 1528 | 12 | 0.09% |
| 1639 | 850 | 1560 | 32 | 1530 | 14 | 0.19% |
| 1644 | 850 | 1572 | 34 | 1530 | 14 | 0.25% |
| 1646 | 850 | 1584 | 36 | 1530 | 14 | 0.14% |
| 1377 | 855 | 1354 | 21 | 1338 | 8 | 0.19% |
| 1382 | 855 | 1356 | 23 | 1338 | 8 | 0.20% |
| 1390 | 855 | 1358 | 25 | 1338 | 8 | 0.14% |
| 1399 | 855 | 1360 | 27 | 1338 | 8 | 0.14% |
| 1383 | 855 | 1354 | 21 | 1340 | 10 | 0.29% |
| 1391 | 855 | 1356 | 23 | 1340 | 10 | 0.41% |
| 1400 | 855 | 1358 | 25 | 1340 | 10 | 0.23% |
| 1409 | 855 | 1360 | 27 | 1340 | 10 | 0.27% |
| 1392 | 855 | 1354 | 21 | 1342 | 12 | 0.52% |
| 1401 | 855 | 1356 | 23 | 1342 | 12 | 0.51% |
| 1410 | 855 | 1358 | 25 | 1342 | 12 | 0.37% |
| 1417 | 855 | 1360 | 27 | 1342 | 12 | 0.33% |
| 1402 | 855 | 1354 | 21 | 1344 | 14 | 0.64% |
| 1411 | 855 | 1356 | 23 | 1344 | 14 | 0.51% |
| 1418 | 855 | 1358 | 25 | 1344 | 14 | 0.34% |
| 1420 | 855 | 1360 | 27 | 1344 | 14 | 0.44% |
| 90 | 4 | 30 | 20 | 10 | 8 | 1.03% |
| 104 | 4 | 34 | 22 | 10 | 8 | 0.82% |
| 120 | 4 | 38 | 24 | 10 | 8 | 0.23% |
| 135 | 4 | 42 | 26 | 10 | 8 | 0.14% |
| 105 | 4 | 30 | 20 | 12 | 10 | 1.78% |
| 121 | 4 | 34 | 22 | 12 | 10 | 0.76% |
| 136 | 4 | 38 | 24 | 12 | 10 | 0.26% |
| 148 | 4 | 42 | 26 | 12 | 10 | 0.12% |
| 122 | 4 | 30 | 20 | 14 | 12 | 1.71% |
| 137 | 4 | 34 | 22 | 14 | 12 | 0.91% |
| 149 | 4 | 38 | 24 | 14 | 12 | 0.32% |
| 155 | 4 | 42 | 26 | 14 | 12 | 0.34% |
| 138 | 4 | 30 | 20 | 16 | 14 | 0.86% |
| 150 | 4 | 34 | 22 | 16 | 14 | 1.40% |
| 156 | 4 | 38 | 24 | 16 | 14 | 1.04% |
| 164 | 4 | 42 | 26 | 16 | 14 | 0.53% |
| 700 | 520 | 538 | 10 | 526 | 8 | 0.73% |
| 704 | 520 | 548 | 12 | 526 | 8 | 0.71% |
| 710 | 520 | 558 | 14 | 526 | 8 | 0.59% |
| 716 | 520 | 568 | 16 | 526 | 8 | 0.53% |
| 705 | 520 | 538 | 10 | 528 | 10 | 1.94% |
| 711 | 520 | 548 | 12 | 528 | 10 | 1.42% |
| 717 | 520 | 558 | 14 | 528 | 10 | 1.31% |
| 722 | 520 | 568 | 16 | 528 | 10 | 1.36% |
| 712 | 520 | 538 | 10 | 530 | 12 | 1.71% |
| 718 | 520 | 548 | 12 | 530 | 12 | 2.10% |
| 723 | 520 | 558 | 14 | 530 | 12 | 1.98% |
| 726 | 520 | 568 | 16 | 530 | 12 | 1.65% |
| 719 | 520 | 538 | 10 | 532 | 14 | 1.59% |
| 724 | 520 | 548 | 12 | 532 | 14 | 1.31% |
| 727 | 520 | 558 | 14 | 532 | 14 | 1.36% |
| 728 | 520 | 568 | 16 | 532 | 14 | 0.86% |

¹The PEgRNA sequence used experimentally further contained 3′ mN*mN*mN*N and 5′mN*mN*mN*N modifications, where m indicates that the nucleotide contains a 2′-O—Me modification and a * indicates a phosphorothioate bond.

### Example 4—Screening of PEgRNA for Editing of a Mutation Associated with Retinitis Pigmentosa

[0453] A plasmid-based screen was performed to mimic delivery of PE2 and PE3 prime editing systems by AAV. Test PEgRNA (and ngRNA for PE3 systems) were cloned into dual split intein prime editor expression plasmids. The full-length prime editor fusion protein expression cassette is around 6.5 kb. To accommodate this construct in a AAV (packaging capacity of ˜4.8 kb), the prime editor was split into two constructs (an N- and C-terminal construct): each of which contains one of a pair of split intein constructs. When expressed in the cell, the split intein constructs excise themselves and ligate the N- and -C-terminal constructs together thereby reconstituting the full-length prime editor fusion protein. The PEgRNA (and ngRNA if present) are also expressed from the plasmids, thereby introducing functional PE2 or PE3 systems into a cell.

[0454] This screen was performed in an HEK293T cell line carrying a RHO c.68C→A mutation (P23H) in the endogenous RHO gene that was generated in accordance with the methods in Example 1. The cell line was expanded and transiently transfected with a set of split intein prime editor expression plasmids (also expressing a PEgRNA or PEgRNA and ngRNA) in arrayed 96-well plates for assessment of editing by high-throughput sequencing.

[0455] The results using a PE2 system (PEgRNA w/o ngRNA) are shown in Table 23. The results using a PE3 system are shown in Table 24. In all cases, the level of precise editing detected was significantly higher than observed in a non-transfection control. The average of 3 replicates is reported.

TABLE 23
Split Intein Prime Editing at a c.68C−>A mutation site in the
endogenous RHO gene of HEK293T cells with a PEgRNA (PE2 system)

| PERNA¹ | Spacer | RTT² | | PBS | | |
|---|---|---|---|---|---|---|
| Se- | Se- | Se- | | Se- | | |
| quence | quence | quence | RTT | quence | PBS | % |
| Number | Number | Number | Length | Number | Length | Edit |
| 1093 | 76 | 768* | 20 | 737 | 8 | 1.22% |
| 1098 | 76 | 768* | 20 | 738 | 9 | 1.18% |
| 1120 | 76 | 775** | 22 | 738 | 9 | 1.10% |
| 355 | 4 | 31*** | 20 | 13 | 11 | 6.41% |
| 356 | 4 | 30 | 20 | 14 | 12 | 8.91% |
| 357 | 4 | 31*** | 20 | 14 | 12 | 5.15% |
| 383 | 4 | 34 | 22 | 14 | 12 | 2.67% |
| 384 | 4 | 35*** | 22 | 14 | 12 | 3.50% |
| 404 | 4 | 35*** | 22 | 15 | 13 | 2.21% |
| 385 | 4 | 31*** | 20 | 16 | 14 | 1.91% |
| 407 | 4 | 35*** | 22 | 16 | 14 | 4.83% |
| 405 | 4 | 30 | 20 | 17 | 15 | 7.60% |

¹The indicated PEgRNA sequence contains, from 5′ to 3′, the indicated Spacer sequence, a gRNA core according to SEQ ID NO: 1854, the indicated RTT sequence, the indicated PBS sequence, a Linker (AACATTGA; Sequence Number 1728) and a 3′ hairpin motif (CGCGTCTCTACGTGGGGGCGCG; SEQ ID NO: 1850). The PEgRNA used experimentally further contained transcription adaptations: a 5′G if the spacer starts with another letter, and a 3′ TTTTTTT termination.
²*= RTT encodes a synonymous TGG-to-TAG PAM silencing edit; **= RTT encodes a synonymous TGG-to-TCG PAM silencing edit; ***= RTT encodes a synonymous GGG-to-GGA PAM silencing edit.

TABLE 24
Split Intein Prime Editing at a c.68C−>A mutation site in the endogenous
RHO gene of HEK293T cells with a PEgRNA and ngRNA (PE3 system)

| | | | | | | ngRNA^{3,4} | |
|---|---|---|---|---|---|---|---|
| PEgRNA¹ | Spacer | RTT² | | PBS | | Spacer | |
| Sequence | Sequence | Sequence | RTT | Sequence | PBS | Sequence | % |
| Number | Number | Number | Length | Number | Length | Number | Edit |
| 1107 | 76 | 776* | 22 | 737 | 8 | 850 | 2.21% |
| 1124 | 76 | 776* | 22 | 739 | 10 | 859* | 3.04% |
| 1130 | 76 | 776* | 22 | 740 | 11 | 850 | 3.72% |
| 1125 | 76 | 768* | 20 | 741 | 12 | 850 | 3.71% |
| 1133 | 76 | 775** | 22 | 741 | 12 | 855 | 14.91% |
| 1134 | 76 | 776* | 22 | 742 | 13 | 859* | 3.23% |
| 1136 | 76 | 775** | 22 | 745 | 16 | 850 | 3.45% |
| 381 | 4 | 34 | 22 | 13 | 11 | 75 | 17.34% |
| 382 | 4 | 31** | 20 | 15 | 13 | 75 | 26.14% |
| 406 | 4 | 31** | 20 | 17 | 15 | 73 | 11.79% |
| 413 | 4 | 35** | 22 | 17 | 15 | 78 | 21.35% |

¹The indicated PEgRNA sequence contains, from 5′ to 3′, the indicated Spacer sequence, a gRNA core according to SEQ ID NO: 1854, the indicated RTT sequence, the indicated PBS sequence, a Linker (AACATTGA; Sequence Number 1728) and a 3′ hairpin motif (CGCGTCTCTACGTGGGGGCGCG; SEQ ID NO: 1850). The PEgRNA used experimentally further contained transcription adaptations: a 5′G if the spacer starts with another letter, and a 3′ TTTTTTT termination.
²*= RTT encodes a synonymous TGG-to-TAG PAM silencing edit; **= RTT encodes a synonymous TGG-to-TCG PAM silencing edit; ***= RTT encodes a synonymous GGG-to-GGA PAM silencing edit.
³The ngRNA used experimentally contained, from 5′ to 3′, the indicated Spacer sequence, a gRNA core according to SEQ ID NO: 1854, a Linker (AACATTGA; Sequence Number 1728) and a 3′ hairpin motif (CGCGTCTCTACGTGGGGGCGCG; SEQ ID NO: 1850). The ngRNA used experimentally further contained transcription adaptations: a 5′G if the spacer starts with another letter, and a 3′ TTTTTTT termination.
⁴*= PE3b ngRNA spacer.

### Example 5—Screening of PEgRNA for Editing of a Mutation Associated with Retinitis Pigmentosa

[0456] A transcription-based screen was performed to test the ability to improve the editing performance of the best performing PEgRNA/ngRNA combinations from Example 4 by using different combinations of gRNA cores (scaffolds) and universal 3′ motifs or by incorporating sequence specific 3′ motifs that are designed to anneal to a portion of the edit template (RTT) while leaving the PBS unblocked. Double stranded DNA (eBlocks) encoding the various PEgRNA and ngRNA tested were obtained from Integrated DNA Technologies.

[0457] This screen was performed in an HEK293T cell line carrying a RHO c.68C→A mutation (P23H) in the endogenous RHO gene that was generated in accordance with the methods in Example 1. The cell line was expanded and transiently transfected with eBlocks containing the PEgRNA and ngRNA being tested and an expression plasmid encoding a Prime Editor fusion protein in arrayed 96-well plates for assessment of editing by high-throughput sequencing.

[0458] The results for 5 different base PEgRNAs are shown in Tables 25-29. In each case, modifications were identified that improved the Prime Editing performance of the PEgRNA in comparison to a base PEgRNA without any scaffold or 3′ motif modifications.

TABLE 25
Improved Prime Editing at a c.68C−>A mutation
site in the endogenous RHO gene of HEK293T cells
with modified PERNA in a PE3 system

| | | | 3′ | | | |
|---|---|---|---|---|---|---|
| PEgRNA¹ | Scaffold | Linker | Motif² | % | % | % |
| Se- | Se- | Se- | Se- | Edit³ | Edit³ | Edit³ |
| quence | quence | quence | quence | (High | (Medium | (Low |
| Number | Number | Number | Number | Dose) | Dose) | Dose) |
| 1108 | 1854 | 1768 | 1851 | 9.09% | 2.46% | 0.48% |
| 1109 | 1855 | 1768 | 1851 | 8.51% | 1.60% | 0.60% |
| 1110 | 1856 | 1768 | 1851 | 7.98% | 1.68% | 0.61% |
| 1137 | 1858 | 1768 | 1851 | 8.44% | 2.05% | 0.35% |
| 1138 | 1859 | 1768 | 1851 | 1.17% | 0.59% | 0.10% |
| 1126 | 1857 | 1768 | 1851 | 1.10% | 0.59% | 0.19% |
| 1111 | 1854 | 1769 | 1851 | 7.95% | 1.60% | 0.31% |
| 1112 | 1855 | 1769 | 1851 | 7.38% | 1.25% | 0.19% |
| 1113 | 1856 | 1769 | 1851 | 8.17% | 1.23% | 0.28% |
| 1139 | 1858 | 1769 | 1851 | 8.78% | 1.12% | 0.35% |
| 1140 | 1859 | 1769 | 1851 | 8.28% | 1.41% | 0.05% |
| 1127 | 1857 | 1769 | 1851 | 7.74% | 1.31% | 0.08% |
| 1114 | 1854 | 1770 | 1852 | 12.86% | 2.56% | 1.59% |
| 1115 | 1855 | 1770 | 1852 | 14.09% | 3.21% | 0.45% |
| 1116 | 1856 | 1770 | 1852 | 13.89% | 2.39% | 0.42% |
| 1141 | 1858 | 1770 | 1852 | 14.59% | 4.43% | 0.43% |
| 1142 | 1859 | 1770 | 1852 | 14.21% | 2.59% | 0.49% |
| 1128 | 1857 | 1770 | 1852 | 8.43% | 1.20% | 0.51% |
| 1117 | 1854 | 1771 | 1852 | 11.08% | 3.27% | 0.36% |
| 1118 | 1855 | 1771 | 1852 | 13.24% | 1.21% | 0.26% |
| 1119 | 1856 | 1771 | 1852 | 12.76% | 0.74% | 0.47% |
| 1143 | 1858 | 1771 | 1852 | 16.92% | 3.31% | 0.39% |
| 1144 | 1859 | 1771 | 1852 | 13.96% | 2.98% | 0.09% |
| 1129 | 1857 | 1771 | 1852 | 12.80% | 2.18% | 0.47% |
| 1145 | 1854 | 1772 | 1853 | 9.42% | 1.13% | 1.26% |
| 1146 | 1855 | 1772 | 1853 | 11.76% | 1.56% | 0.56% |
| 1147 | 1856 | 1772 | 1853 | 11.51% | 1.15% | 0.20% |
| 1153 | 1858 | 1772 | 1853 | 13.42% | 1.08% | 0.18% |
| 1154 | 1859 | 1772 | 1853 | 6.67% | 1.02% | 0.14% |
| 1151 | 1857 | 1772 | 1853 | 4.95% | 0.77% | 0.38% |
| 1148 | 1854 | 1773 | 1853 | 9.65% | 0.74% | 0.21% |
| 1149 | 1855 | 1773 | 1853 | 10.29% | 0.88% | 0.27% |
| 1150 | 1856 | 1773 | 1853 | 7.83% | 0.50% | 0.19% |
| 1155 | 1858 | 1773 | 1853 | 10.53% | 0.35% | 0.19% |
| 1156 | 1859 | 1773 | 1853 | 10.71% | 0.31% | 0.08% |
| 1152 | 1857 | 1773 | 1853 | 8.74% | 1.27% | 0.26% |
| 982 | 1857 | | | 6.63% | 1.22% | 1.00% |
| 987 | 1857 | 1746 | 1818* | 9.25% | 1.44% | 0.49% |
| 988 | 1857 | 1747 | 1819* | 10.99% | 1.39% | 0.32% |
| 989 | 1857 | 1748 | 1820* | 7.47% | 2.63% | 0.23% |
| 990 | 1857 | 1749 | 1821* | 4.53% | 0.93% | 0.19% |
| 991 | 1857 | 1750 | 1822* | 7.00% | 1.13% | 0.72% |
| 992 | 1857 | 1751 | 1823* | 7.24% | 1.39% | 0.15% |
| 993 | 1857 | 1751 | 1824* | 9.53% | 1.47% | 0.33% |
| 994 | 1857 | 1752 | 1825* | 8.87% | 1.12% | 0.35% |
| 995 | 1857 | 1753 | 1826* | 9.77% | 0.81% | 0.30% |
| 996 | 1857 | 1754 | 1827* | 13.15% | 0.82% | 0.07% |
| 997 | 1857 | 1755 | 1828* | 10.27% | 1.38% | 0.08% |
| 998 | 1857 | 1756 | 1829* | 8.70% | 1.10% | 1.21% |
| 999 | 1857 | 1757 | 1830* | 9.08% | 0.61% | 0.59% |
| 1000 | 1857 | 1758 | 1831* | 9.07% | 2.18% | 0.18% |
| 1001 | 1857 | 1759 | 1832* | 8.47% | 1.69% | 0.20% |
| 1002 | 1857 | 1760 | 1833* | 9.69% | 1.42% | 0.13% |
| 1003 | 1857 | 1761 | 1834* | 10.01% | 1.28% | 3.36% |
| 1004 | 1857 | 1748 | 1835* | 7.83% | 1.27% | 0.34% |
| 1005 | 1857 | 1749 | 1836* | 7.28% | 1.00% | 0.24% |
| 1006 | 1857 | 1750 | 1837* | 7.92% | 0.40% | 0.41% |
| 1007 | 1857 | 1749 | 1838* | 7.29% | 0.51% | 0.27% |
| 1008 | 1857 | 1751 | 1839* | 10.90% | 0.43% | 0.08% |
| 1009 | 1857 | 1752 | 1840* | 6.88% | 0.43% | 0.12% |
| 1010 | 1857 | 1762 | 1841* | 7.67% | 1.65% | 0.62% |
| 1011 | 1857 | 1754 | 1842* | 8.27% | 1.12% | 0.13% |
| 1012 | 1857 | 1718 | 1843* | 9.78% | 1.95% | 0.09% |
| 1013 | 1857 | 1763 | 1844* | 4.48% | 1.45% | 0.10% |
| 1014 | 1857 | 1764 | 1845* | 13.81% | 4.02% | 0.28% |
| 1015 | 1857 | 1765 | 1846* | 16.04% | 2.03% | 2.58% |
| 1016 | 1857 | 1766 | 1847* | 14.02% | 1.68% | 0.12% |
| 1017 | 1857 | 1757 | 1848* | 13.86% | 2.26% | 0.31% |
| 1018 | 1857 | 1767 | 1849* | 9.60% | 1.62% | 0.23% |

¹The indicated PEgRNA sequence contains, from 5′ to 3′, a Spacer sequence according to SEQ ID NO: 76, a gRNA core according to the indicated Scaffold Sequence, an RTT sequence according to Sequence Number 775 (encodes a TGG-to-TCG synonymous PAM silencing edit), a PBS sequence according to Sequence Number 741, and the indicated Linker and 3′ motif sequences. The PEgRNA used experimentally further contained transcription adaptations: a 5′G because the spacer starts with another letter, and a 3′ TTTTTTT termination.
²A “*” indicates that the 3′ motif is a sequence specific motif designed to hybridize with a portion of the RTT while not covering the PBS. The other 3′ motifs are universal or structural motifs that are designed to form their own tertiary structure.
³The percent editing was achieved in combination with a ngRNA according to SEQ ID NO: 1184, which contains from 5′ to 3′ a spacer according to Sequence Number 855, a gRNA core according to Sequence Number 1854, a Linker according to Sequence Number 1728, and a 3′ motif according to Sequence Number 1861. The ngRNA used experimentally further contained transcription adaptations: a 3′ TTTTTTT termination.

TABLE 26
Improved Prime Editing at a c.68C−>A mutation
site in the endogenous RHO gene of HEK293T cells
with modified PERNA in a PE3 system

| | | | 3′ | | | |
|---|---|---|---|---|---|---|
| PEgRNA¹ | Scaffold | Linker | Motif² | % | % | % |
| Se- | Se- | Se- | Se- | Edit³ | Edit³ | Edit³ |
| quence | quence | quence | quence | (High | (Medium | (Low |
| Number | Number | Number | Number | Dose) | Dose) | Dose) |
| 331 | 1854 | 1712 | 1851 | 28.37% | 16.38% | 4.76% |
| 332 | 1855 | 1712 | 1851 | 24.21% | 12.54% | 11.63% |
| 333 | 1856 | 1712 | 1851 | 24.59% | 11.43% | 8.57% |
| 414 | 1858 | 1712 | 1851 | 13.43% | 13.38% | 9.26% |
| 415 | 1859 | 1712 | 1851 | 23.24% | 13.16% | 16.28% |
| 361 | 1857 | 1712 | 1851 | 22.67% | 8.48% | 6.82% |
| 334 | 1854 | 1729 | 1851 | 19.46% | 12.39% | 7.78% |
| 335 | 1855 | 1729 | 1851 | 22.38% | 11.58% | 9.75% |
| 336 | 1856 | 1729 | 1851 | 25.10% | 12.11% | 5.72% |
| 416 | 1858 | 1729 | 1851 | 20.66% | 12.31% | 9.15% |
| 417 | 1859 | 1729 | 1851 | 21.08% | 13.20% | 8.75% |
| 362 | 1857 | 1729 | 1851 | 22.31% | 11.62% | 7.81% |
| 337 | 1854 | 1730 | 1852 | 24.24% | 12.89% | 5.79% |
| 338 | 1855 | 1730 | 1852 | 28.12% | 13.31% | 6.10% |
| 339 | 1856 | 1730 | 1852 | 25.74% | 8.53% | 6.20% |
| 418 | 1858 | 1730 | 1852 | 25.17% | 13.82% | 10.10% |
| 419 | 1859 | 1730 | 1852 | 25.09% | 14.93% | 4.65% |
| 363 | 1857 | 1730 | 1852 | 24.55% | 11.74% | 3.54% |
| 340 | 1854 | 1731 | 1852 | 23.26% | 10.02% | 4.59% |
| 341 | 1855 | 1731 | 1852 | 20.40% | 11.39% | 7.54% |
| 342 | 1856 | 1731 | 1852 | 21.26% | 13.32% | 5.17% |
| 420 | 1858 | 1731 | 1852 | 21.31% | 15.22% | 7.58% |
| 421 | 1859 | 1731 | 1852 | 28.13% | 14.12% | 6.09% |
| 364 | 1857 | 1731 | 1852 | 26.15% | 9.20% | 5.37% |
| 446 | 1854 | 1658 | 1853 | 28.92% | 16.65% | 3.67% |
| 447 | 1855 | 1658 | 1853 | 28.49% | 17.74% | 7.72% |
| 448 | 1856 | 1658 | 1853 | 24.26% | 18.56% | 0.06% |
| 478 | 1858 | 1658 | 1853 | 24.17% | 18.63% | 7.41% |
| 479 | 1859 | 1658 | 1853 | 21.75% | 20.99% | 6.27% |
| 458 | 1857 | 1658 | 1853 | 24.77% | 18.67% | 5.31% |
| 449 | 1854 | 1739 | 1853 | 31.22% | 19.46% | 7.03% |
| 450 | 1855 | 1739 | 1853 | 28.21% | 21.13% | 6.73% |
| 451 | 1856 | 1739 | 1853 | 27.15% | 20.82% | 8.16% |
| 480 | 1858 | 1739 | 1853 | 29.52% | 19.00% | 7.67% |
| 481 | 1859 | 1739 | 1853 | 29.98% | 20.21% | 7.41% |
| 459 | 1857 | 1739 | 1853 | 24.78% | 16.84% | 0.10% |
| 146 | 1856 | | | 15.78% | 8.09% | 5.40% |
| 170 | 1856 | 1647 | 1774* | 23.91% | 11.81% | 0.04% |
| 171 | 1856 | 1648 | 1775* | 17.73% | 13.69% | 0.09% |
| 172 | 1856 | 1649 | 1776* | 12.55% | 16.20% | 0.05% |
| 173 | 1856 | 1650 | 1777* | 7.67% | 5.64% | 0.10% |
| 174 | 1856 | 1651 | 1778* | 12.45% | 14.16% | 0.04% |
| 175 | 1856 | 1652 | 1779* | 14.19% | 12.97% | 4.07% |
| 176 | 1856 | 1653 | 1780* | 15.12% | 12.97% | 6.47% |
| 177 | 1856 | 1654 | 1781* | 12.31% | 5.58% | 4.79% |
| 178 | 1856 | 1655 | 1782* | 10.09% | 6.06% | 5.55% |
| 179 | 1856 | 1656 | 1783* | 15.31% | 8.87% | 1.80% |
| 180 | 1856 | 1657 | 1784* | 18.47% | 9.41% | 7.49% |
| 181 | 1856 | 1658 | 1785* | 19.81% | 10.04% | 4.22% |
| 182 | 1856 | 1659 | 1786* | 25.19% | 5.81% | 3.93% |
| 183 | 1856 | 1660 | 1787* | 23.07% | 13.09% | 1.43% |
| 184 | 1856 | 1661 | 1788* | 9.10% | 13.32% | 2.57% |
| 185 | 1856 | 1662 | 1789* | 30.94% | 8.89% | 2.37% |
| 186 | 1856 | 1661 | 1790* | 30.03% | 7.77% | 4.14% |
| 202 | 1856 | 1649 | 1797* | 31.92% | 7.88% | 3.09% |
| 203 | 1856 | 1650 | 1798* | 14.06% | 5.76% | 3.74% |
| 204 | 1856 | 1678 | 1799* | 24.13% | 12.85% | 3.56% |
| 205 | 1856 | 1679 | 1800* | 14.96% | 13.38% | 4.71% |
| 206 | 1856 | 1653 | 1801* | 24.49% | 0.08% | 1.88% |
| 207 | 1856 | 1680 | 1802* | 22.19% | 12.76% | 4.99% |
| 208 | 1856 | 1681 | 1803* | 21.50% | 11.98% | 3.14% |
| 209 | 1856 | 1682 | 1804* | 23.10% | 12.23% | 2.65% |
| 210 | 1856 | 1683 | 1805* | 23.59% | 9.85% | 4.26% |
| 211 | 1856 | 1684 | 1806* | 22.83% | 16.31% | 5.10% |
| 212 | 1856 | 1685 | 1807* | 20.54% | 15.65% | 3.40% |
| 213 | 1856 | 1686 | 1808* | 21.74% | 3.76% | 0.06% |
| 214 | 1856 | 1687 | 1809* | 7.80% | 18.84% | 0.82% |
| 215 | 1856 | 1688 | 1810* | 13.90% | 12.32% | 6.47% |
| 216 | 1856 | 1661 | 1811* | N/A | 13.97% | 2.17% |

¹The indicated PEgRNA sequence contains, from 5′ to 3′, a Spacer sequence according to SEQ ID NO: 4, a gRNA core according to the indicated Scaffold Sequence, an RTT sequence according to Sequence Number 34, a PBS sequence according to Sequence Number 13, and the indicated Linker and 3′ motif sequences. The PEgRNA used experimentally further contained transcription adaptations: a 3′ TTTTTTT termination.
²A “*” indicates that the 3′ motif is a sequence specific motif designed to hybridize with a portion of the RTT while not covering the PBS. The other 3′ motifs are universal or structural motifs that are designed to form their own tertiary structure.
³The percent editing was achieved in combination with a ngRNA according to SEQ ID NO: 514, which contains from 5′ to 3′ a spacer according to Sequence Number 75, a gRNA core according to Sequence Number 1854, a Linker according to Sequence Number 1728, and a 3′ motif according to Sequence Number 1861. The ngRNA used experimentally further contained transcription adaptations: a 3′ TTTTTTT termination.

TABLE 27
Improved Prime Editing at a c.68C−>A mutation
site in the endogenous RHO gene of HEK293T cells
with modified PEgRNA in a PE3 system

| | | | 3′ | | | |
|---|---|---|---|---|---|---|
| PEgRNA¹ | Scaffold | Linker | Motif² | % | % | % |
| Se- | Se- | Se- | Se- | Edit³ | Edit³ | Edit³ |
| quence | quence | quence | quence | (High | (Medium | (Low |
| Number | Number | Number | Number | Dose) | Dose) | Dose) |
| 343 | 1854 | 1732 | 1851 | 35.55% | 15.51% | 5.66% |
| 344 | 1855 | 1732 | 1851 | 34.31% | 22.93% | 5.88% |
| 345 | 1856 | 1732 | 1851 | 32.54% | 19.28% | 6.27% |
| 422 | 1858 | 1732 | 1851 | 31.45% | 19.18% | 0.06% |
| 423 | 1859 | 1732 | 1851 | 32.87% | 20.89% | 0.05% |
| 365 | 1857 | 1732 | 1851 | 30.36% | 18.10% | 0.05% |
| 346 | 1854 | 1733 | 1851 | 34.99% | 17.11% | 12.50% |
| 347 | 1855 | 1733 | 1851 | 34.16% | 21.02% | 6.38% |
| 348 | 1856 | 1733 | 1851 | 36.10% | 18.07% | 11.11% |
| 424 | 1858 | 1733 | 1851 | 33.13% | 19.88% | 8.57% |
| 425 | 1859 | 1733 | 1851 | 34.23% | 18.29% | 19.57% |
| 366 | 1857 | 1733 | 1851 | 32.70% | 22.94% | 16.33% |
| 349 | 1854 | 1734 | 1852 | 35.88% | 15.06% | 7.44% |
| 350 | 1855 | 1734 | 1852 | 34.78% | 19.48% | 8.58% |
| 351 | 1856 | 1734 | 1852 | 43.46% | 19.06% | 11.61% |
| 426 | 1858 | 1734 | 1852 | 28.02% | 22.20% | 8.73% |
| 427 | 1859 | 1734 | 1852 | 41.93% | 20.09% | 9.43% |
| 367 | 1857 | 1734 | 1852 | 39.17% | 21.64% | 8.19% |
| 352 | 1854 | 1676 | 1852 | 37.71% | 18.70% | 8.83% |
| 353 | 1855 | 1676 | 1852 | 41.33% | 18.52% | 10.47% |
| 354 | 1856 | 1676 | 1852 | 0.29% | 1.76% | 9.73% |
| 428 | 1858 | 1676 | 1852 | 40.62% | 18.59% | 8.97% |
| 429 | 1859 | 1676 | 1852 | 40.31% | 17.35% | 8.16% |
| 368 | 1857 | 1676 | 1852 | 36.60% | 17.14% | 8.84% |
| 452 | 1854 | 1740 | 1853 | 36.66% | 17.27% | 7.46% |
| 453 | 1855 | 1740 | 1853 | 42.96% | 10.97% | 11.35% |
| 454 | 1856 | 1740 | 1853 | 44.76% | 17.02% | 12.84% |
| 482 | 1858 | 1740 | 1853 | 42.36% | 24.67% | 12.22% |
| 483 | 1859 | 1740 | 1853 | 40.38% | 18.15% | 20.42% |
| 460 | 1857 | 1740 | 1853 | 37.34% | 24.75% | 2.47% |
| 455 | 1854 | 1741 | 1853 | 41.98% | 21.70% | 6.51% |
| 456 | 1855 | 1741 | 1853 | 39.54% | 23.87% | 7.01% |
| 457 | 1856 | 1741 | 1853 | 43.96% | 22.93% | 0.79% |
| 484 | 1858 | 1741 | 1853 | 42.84% | 19.12% | 7.27% |
| 485 | 1859 | 1741 | 1853 | 42.83% | 25.77% | 6.11% |
| 461 | 1857 | 1741 | 1853 | 39.58% | 16.81% | 1.64% |
| 147 | 1856 | | | 24.12% | 7.77% | 7.75% |
| 187 | 1856 | 1663 | 1776* | 41.67% | 18.01% | 7.10% |
| 188 | 1856 | 1664 | 1777* | 42.96% | 19.38% | 4.22% |
| 189 | 1856 | 1665 | 1778* | 45.19% | 24.31% | 14.83% |
| 190 | 1856 | 1666 | 1779* | 26.53% | 0.17% | 18.78% |
| 191 | 1856 | 1667 | 1780* | 40.80% | 23.10% | 1.31% |
| 192 | 1856 | 1668 | 1781* | 31.66% | 9.85% | 5.50% |
| 193 | 1856 | 1669 | 1782* | 29.78% | 9.38% | 8.84% |
| 194 | 1856 | 1670 | 1783* | 41.53% | 12.36% | 5.87% |
| 195 | 1856 | 1671 | 1784* | 31.50% | 10.47% | 6.73% |
| 196 | 1856 | 1672 | 1694* | 31.40% | 9.97% | 1.54% |
| 197 | 1856 | 1673 | 1792* | 21.86% | 7.42% | 8.51% |
| 198 | 1856 | 1674 | 1793* | 35.53% | 19.36% | 4.22% |
| 199 | 1856 | 1675 | 1794* | 25.17% | 17.81% | 12.19% |
| 200 | 1856 | 1676 | 1795* | 38.74% | 28.40% | 15.88% |
| 201 | 1856 | 1677 | 1796* | 40.08% | 30.29% | 17.80% |
| 217 | 1856 | 1665 | 1799* | 41.13% | 32.09% | 0.06% |
| 218 | 1856 | 1689 | 1800* | 19.58% | 28.04% | 1.94% |
| 219 | 1856 | 1676 | 1801* | 40.55% | 27.78% | 2.45% |
| 220 | 1856 | 1690 | 1802* | 42.51% | 33.77% | 8.88% |
| 221 | 1856 | 1691 | 1803* | 41.39% | 24.14% | 4.12% |
| 222 | 1856 | 1692 | 1804* | 41.50% | 18.50% | 1.88% |
| 223 | 1856 | 1693 | 1805* | 40.64% | 23.86% | 2.99% |
| 224 | 1856 | 1694 | 1812* | 34.80% | 18.15% | 2.31% |
| 225 | 1856 | 1695 | 1813* | 33.57% | 18.57% | 12.14% |
| 226 | 1856 | 1696 | 1814* | 40.42% | 22.89% | 14.20% |
| 227 | 1856 | 1675 | 1815* | 39.21% | 26.88% | 9.72% |
| 228 | 1856 | 1676 | 1816* | 41.48% | 28.49% | 15.52% |
| 229 | 1856 | 1697 | 1817* | 40.30% | 26.02% | 21.13% |

¹The indicated PEgRNA sequence contains, from 5′ to 3′, a Spacer sequence according to SEQ ID NO: 4, a gRNA core according to the indicated Scaffold Sequence, an RTT sequence according to Sequence Number 31 (encodes a GGG-to-GGA synonymous PAM silencing edit), a PBS sequence according to Sequence Number 15, and the indicated Linker and 3′ motif sequences. The PEgRNA used experimentally further contained transcription adaptations: a 3′ TTTTTTT termination.
²A “*” indicates that the 3′ motif is a sequence specific motif designed to hybridize with a portion of the RTT while not covering the PBS. The other 3′ motifs are universal or structural motifs that are designed to form their own tertiary structure.
³The percent editing was achieved in combination with a ngRNA according to SEQ ID NO: 514, which contains from 5′ to 3′ a spacer according to Sequence Number 75, a gRNA core according to Sequence Number 1854, a Linker according to Sequence Number 1728, and a 3′ motif according to Sequence Number 1861. The ngRNA used experimentally further contained transcription adaptations: a 3′ TTTTTTT termination.

TABLE 28
Improved Prime Editing at a c.68C−>A mutation
site in the endogenous RHO gene of HEK293T cells
with modified PEgRNA in a PE3 system

| | | | 3′ | | | |
|---|---|---|---|---|---|---|
| PEgRNA¹ | Scaffold | Linker | Motif² | % | % | % |
| Se- | Se- | Se- | Se- | Edit³ | Edit³ | Edit³ |
| quence | quence | quence | quence | (High | (Medium | (Low |
| Number | Number | Number | Number | Dose) | Dose) | Dose) |
| 369 | 1854 | 1735 | 1851 | 20.76% | 10.85% | 13.03% |
| 370 | 1855 | 1735 | 1851 | 25.81% | 11.45% | 12.21% |
| 371 | 1856 | 1735 | 1851 | N/A | 10.79% | 8.88% |
| 430 | 1858 | 1735 | 1851 | 26.42% | 14.85% | 10.49% |
| 431 | 1859 | 1735 | 1851 | 22.63% | 9.36% | 15.16% |
| 388 | 1857 | 1735 | 1851 | 28.71% | 10.44% | 6.73% |
| 372 | 1854 | 1736 | 1851 | 29.24% | 11.23% | 6.06% |
| 373 | 1855 | 1736 | 1851 | 27.08% | 10.19% | 11.69% |
| 374 | 1856 | 1736 | 1851 | N/A | 10.22% | 10.00% |
| 432 | 1858 | 1736 | 1851 | 30.05% | 13.51% | 18.65% |
| 433 | 1859 | 1736 | 1851 | 29.06% | 11.99% | 18.17% |
| 389 | 1857 | 1736 | 1851 | 31.32% | 8.84% | 0.04% |
| 375 | 1854 | 1709 | 1852 | 34.14% | 13.47% | 17.24% |
| 376 | 1855 | 1709 | 1852 | 45.95% | 13.51% | 21.88% |
| 377 | 1856 | 1709 | 1852 | 39.25% | 16.41% | 5.56% |
| 434 | 1858 | 1709 | 1852 | 43.06% | 19.77% | 12.50% |
| 435 | 1859 | 1709 | 1852 | 44.39% | 13.32% | 12.50% |
| 390 | 1857 | 1709 | 1852 | 40.35% | 14.25% | 6.45% |
| 378 | 1854 | 1724 | 1852 | 37.53% | 19.07% | 3.98% |
| 379 | 1855 | 1724 | 1852 | 43.95% | 14.53% | 5.94% |
| 380 | 1856 | 1724 | 1852 | 30.39% | 13.33% | 0.05% |
| 436 | 1858 | 1724 | 1852 | 43.11% | 13.85% | 3.92% |
| 437 | 1859 | 1724 | 1852 | 41.40% | 19.20% | 2.94% |
| 391 | 1857 | 1724 | 1852 | 39.73% | 20.05% | 0.04% |
| 462 | 1854 | 1742 | 1853 | 32.14% | 18.98% | 3.45% |
| 463 | 1855 | 1742 | 1853 | 41.73% | 15.93% | 5.11% |
| 464 | 1856 | 1742 | 1853 | 38.64% | 16.85% | 3.24% |
| 486 | 1858 | 1742 | 1853 | 34.80% | 18.40% | 2.50% |
| 487 | 1859 | 1742 | 1853 | 36.51% | 16.89% | 4.15% |
| 468 | 1857 | 1742 | 1853 | 37.53% | 15.20% | 3.26% |
| 465 | 1854 | 1743 | 1853 | 37.97% | 12.55% | 4.56% |
| 466 | 1855 | 1743 | 1853 | 40.09% | 18.41% | 4.67% |
| 467 | 1856 | 1743 | 1853 | 40.91% | 15.29% | 2.65% |
| 488 | 1858 | 1743 | 1853 | 39.06% | 12.27% | 2.27% |
| 489 | 1859 | 1743 | 1853 | 42.50% | 12.74% | 1.42% |
| 469 | 1857 | 1743 | 1853 | 33.50% | 19.14% | 1.62% |
| 154 | 1856 | | | 16.37% | 14.62% | 5.58% |
| 230 | 1856 | 1698 | 1776* | 40.57% | 18.96% | 8.24% |
| 231 | 1856 | 1699 | 1777* | 34.09% | 14.14% | 4.28% |
| 232 | 1856 | 1700 | 1778* | 43.42% | 24.11% | 4.91% |
| 233 | 1856 | 1701 | 1779* | 40.99% | 17.80% | 4.57% |
| 234 | 1856 | 1702 | 1780* | 42.26% | 18.27% | 4.52% |
| 235 | 1856 | 1703 | 1781* | 31.15% | 17.37% | 6.85% |
| 236 | 1856 | 1704 | 1782* | 36.59% | 11.61% | 6.14% |
| 237 | 1856 | 1705 | 1783* | 28.07% | 8.41% | 5.49% |
| 238 | 1856 | 1706 | 1784* | 34.03% | 9.59% | 5.58% |
| 239 | 1856 | 1707 | 1694* | 2.85% | 0.12% | 4.02% |
| 240 | 1856 | 1708 | 1792* | 30.92% | 12.30% | 3.11% |
| 241 | 1856 | 1709 | 1793* | 36.55% | 23.19% | 4.39% |
| 242 | 1856 | 1661 | 1794* | 25.17% | 17.15% | 5.54% |
| 243 | 1856 | 1710 | 1795* | 33.78% | 20.10% | 4.75% |
| 244 | 1856 | 1711 | 1796* | 36.75% | 24.77% | 4.43% |
| 245 | 1856 | 1700 | 1799* | 41.60% | 17.12% | 3.35% |
| 246 | 1856 | 1701 | 1800* | 39.68% | 23.33% | 3.73% |
| 247 | 1856 | 1712 | 1801* | 36.93% | 29.59% | 5.43% |
| 248 | 1856 | 1713 | 1802* | 34.27% | 16.02% | 9.56% |
| 249 | 1856 | 1714 | 1803* | 36.81% | 14.43% | 5.15% |
| 250 | 1856 | 1705 | 1804* | 24.26% | 19.06% | 5.60% |
| 251 | 1856 | 1715 | 1805* | 36.38% | 17.38% | 7.00% |
| 252 | 1856 | 1716 | 1812* | 33.04% | 23.60% | 0.89% |
| 253 | 1856 | 1661 | 1813* | 24.98% | 21.60% | 2.93% |
| 254 | 1856 | 1709 | 1814* | 25.41% | 0.09% | 18.62% |
| 255 | 1856 | 1661 | 1815* | 26.08% | 21.48% | 3.15% |
| 256 | 1856 | 1688 | 1816* | 25.27% | 26.24% | 3.75% |
| 257 | 1856 | 1717 | 1817* | 9.02% | 21.02% | 0.04% |

¹The indicated PEgRNA sequence containns, from 5′ to 3′, a Spacer sequence according to SEQ ID NO: 4, a gRNA core according to the indicated Scaffold Sequence, an RTT sequence according to Sequence Number 31 (encodes a GGG-to-GGA synonymous PAM silencing edit), a PBS sequence according to Sequence Number 17, and the indicated Linker and 3′ motif sequences. The PEgRNA used experimentally further contained transcription adaptations: a 3′ TTTTTTT termination.
²A “*” indicates that the 3′ motif is a sequence specific motif designed to hybridize with a portion of the RTT while not covering the PBS. The other 3′ motifs are universal or structural motifs that are designed to form their own tertiary structure.
³The percent editing was achieved in combination with a ngRNA according to SEQ ID NO: 515, which contains from 5′ to 3′ a spacer according to Sequence Number 73, a gRNA core according to Sequence Number 1854, a Linker according to Sequence Number 1728, and a 3′ motif according to Sequence Number 1861. The ngRNA used experimentally further contained transcription adaptations: a 3′ TTTTTTT termination.

TABLE 29
Improved Prime Editing at a c.68C−>A mutation
site in the endogenous RHO gene of HEK293T cells
with modified PEgRNA in a PE3 system

| | | | 3′ | | | |
|---|---|---|---|---|---|---|
| PEgRNA¹ | Scaffold | Linker | Motif² | % | % | % |
| Se- | Se- | Se- | Se- | Edit³ | Edit³ | Edit³ |
| quence | quence | quence | quence | (High | (Medium | (Low |
| Number | Number | Number | Number | Dose) | Dose) | Dose) |
| 392 | 1854 | 1737 | 1851 | 21.28% | 9.95% | 1.07% |
| 393 | 1855 | 1737 | 1851 | 26.45% | 7.47% | 0.06% |
| 394 | 1856 | 1737 | 1851 | 27.48% | 6.75% | 0.64% |
| 438 | 1858 | 1737 | 1851 | 27.52% | 5.93% | 0.67% |
| 439 | 1859 | 1737 | 1851 | 26.86% | 3.64% | 1.10% |
| 409 | 1857 | 1737 | 1851 | 26.78% | 0.05% | 0.86% |
| 395 | 1854 | 1738 | 1851 | 23.86% | 0.08% | 1.13% |
| 396 | 1855 | 1738 | 1851 | 23.63% | 23.36% | 0.41% |
| 397 | 1856 | 1738 | 1851 | 26.69% | 5.48% | 1.04% |
| 440 | 1858 | 1738 | 1851 | 22.87% | 2.21% | 0.68% |
| 441 | 1859 | 1738 | 1851 | 21.12% | 3.78% | 0.80% |
| 410 | 1857 | 1738 | 1851 | 19.76% | 10.75% | 0.55% |
| 398 | 1854 | 1710 | 1852 | 36.65% | 9.09% | 0.80% |
| 399 | 1855 | 1710 | 1852 | 33.71% | 8.55% | 1.31% |
| 400 | 1856 | 1710 | 1852 | 37.34% | 0.07% | 0.07% |
| 442 | 1858 | 1710 | 1852 | 31.08% | 7.73% | 2.38% |
| 443 | 1859 | 1710 | 1852 | 28.77% | 0.09% | 1.43% |
| 411 | 1857 | 1710 | 1852 | 28.44% | 0.06% | 0.94% |
| 401 | 1854 | 1651 | 1852 | 28.15% | 14.94% | 0.98% |
| 402 | 1855 | 1651 | 1852 | 29.14% | 10.87% | 1.03% |
| 403 | 1856 | 1651 | 1852 | 32.97% | 6.67% | 1.08% |
| 444 | 1858 | 1651 | 1852 | 31.75% | 10.28% | 1.15% |
| 445 | 1859 | 1651 | 1852 | 37.87% | 10.98% | 0.88% |
| 412 | 1857 | 1651 | 1852 | 32.20% | 12.77% | 0.91% |
| 470 | 1854 | 1744 | 1853 | 33.45% | 5.48% | 1.17% |
| 471 | 1855 | 1744 | 1853 | 32.63% | 5.70% | 0.85% |
| 472 | 1856 | 1744 | 1853 | 36.67% | 6.62% | 0.07% |
| 490 | 1858 | 1744 | 1853 | 35.55% | 8.26% | 2.30% |
| 491 | 1859 | 1744 | 1853 | 34.06% | 6.56% | 1.10% |
| 476 | 1857 | 1744 | 1853 | 34.51% | 7.37% | 0.77% |
| 473 | 1854 | 1745 | 1853 | 36.78% | 3.07% | 1.07% |
| 474 | 1855 | 1745 | 1853 | 35.60% | 4.74% | 0.68% |
| 475 | 1856 | 1745 | 1853 | 37.27% | 7.08% | 0.85% |
| 492 | 1858 | 1745 | 1853 | 35.36% | 6.52% | 0.83% |
| 493 | 1859 | 1745 | 1853 | 34.13% | 3.99% | 0.84% |
| 477 | 1857 | 1745 | 1853 | 33.60% | 3.55% | 0.67% |
| 163 | 1856 | | | | 9.26% | 0.80% |
| 258 | 1856 | 1718 | 1774* | 32.58% | 13.75% | 0.91% |
| 259 | 1856 | 1719 | 1775* | 36.21% | 9.40% | 0.07% |
| 260 | 1856 | 1698 | 1776* | 35.55% | 14.27% | 1.87% |
| 261 | 1856 | 1699 | 1777* | 36.61% | 10.91% | 0.79% |
| 262 | 1856 | 1700 | 1778* | 37.59% | 11.46% | 0.67% |
| 263 | 1856 | 1701 | 1779* | 37.25% | 8.46% | 1.11% |
| 264 | 1856 | 1702 | 1780* | 35.65% | 3.20% | 0.71% |
| 265 | 1856 | 1703 | 1781* | 30.27% | 1.72% | 0.87% |
| 266 | 1856 | 1720 | 1782* | 24.18% | 0.27% | 0.77% |
| 267 | 1856 | 1721 | 1783* | 27.91% | 2.48% | 0.82% |
| 268 | 1856 | 1722 | 1784* | 27.21% | 0.20% | 0.15% |
| 269 | 1856 | 1723 | 1694* | 35.24% | 7.68% | 0.92% |
| 270 | 1856 | 1708 | 1792* | 32.49% | 11.26% | 1.10% |
| 271 | 1856 | 1724 | 1793* | 37.87% | 10.78% | 0.10% |
| 272 | 1856 | 1725 | 1794* | 31.55% | 13.77% | 1.80% |
| 273 | 1856 | 1726 | 1795* | 33.98% | 1.21% | 0.84% |
| 274 | 1856 | 1727 | 1796* | 38.37% | 8.69% | 1.05% |
| 276 | 1856 | 1698 | 1797* | 41.13% | 8.89% | 0.96% |
| 277 | 1856 | 1690 | 1798* | 37.52% | 6.18% | 0.83% |
| 278 | 1856 | 1700 | 1799* | 37.85% | 11.04% | 8.20% |
| 279 | 1856 | 1701 | 1800* | 41.22% | 13.80% | 0.88% |
| 280 | 1856 | 1712 | 1801* | 36.47% | 13.27% | 1.12% |
| 281 | 1856 | 1713 | 1802* | 34.88% | 9.48% | 0.78% |
| 282 | 1856 | 1714 | 1803* | 27.47% | 6.10% | 0.74% |
| 283 | 1856 | 1705 | 1804* | 26.94% | 9.72% | 1.04% |
| 284 | 1856 | 1715 | 1805* | 32.50% | 5.53% | 0.06% |
| 285 | 1856 | 1716 | 1812* | 39.84% | 10.74% | 2.38% |
| 286 | 1856 | 1723 | 1813* | 35.81% | 11.83% | 0.78% |
| 287 | 1856 | 1709 | 1814* | 40.00% | 12.56% | 0.94% |
| 288 | 1856 | 1652 | 1815* | 33.51% | 2.34% | 0.91% |
| 289 | 1856 | 1688 | 1816* | 39.12% | 7.11% | 0.91% |
| 290 | 1856 | 1661 | 1817* | 39.76% | 5.31% | 0.29% |

¹The indicated PEgRNA sequence contains, from 5′ to 3′, a Spacer sequence according to SEQ ID NO: 4, a gRNA core according to the indicated Scaffold Sequence, an RTT sequence according to Sequence Number 35 (encodes a GGG-to-GGA synonymous PAM silencing edit), a PBS sequence according to Sequence Number 17, and the indicated Linker and 3′ motif sequences. The PEgRNA used experimentally further contained transcription adaptations: a 3′ TTTTTTT termination.
²A “*” indicates that the 3′ motif is a sequence specific motif designed to hybridize with a portion of the RTT while not covering the PBS. The other 3′ motifs are universal or structural motifs that are designed to form their own tertiary structure.
³The percent editing was achieved in combination with a ngRNA according to SEQ ID NO: 513, which contains from 5′ to 3′ a spacer according to Sequence Number 78, a gRNA core according to Sequence Number 1854, a Linker according to Sequence Number 1728, and a 3′ motif according to Sequence Number 1861. The ngRNA used experimentally further contained transcription adaptations: a 3′ TTTTTTT termination.

The application's sequence listing, which the Patent Office published only in electronic form, follows.

SEQUENCE LISTING (1983 sequences)

SEQ ID NO: 1 - RNA, 17 nt, synthetic construct
  source 1..17: mol_type = other RNA
cagccaggtagtactgt

SEQ ID NO: 2 - RNA, 18 nt, synthetic construct
  source 1..18: mol_type = other RNA
tcagccaggtagtactgt

SEQ ID NO: 3 - RNA, 19 nt, synthetic construct
  source 1..19: mol_type = other RNA
ctcagccaggtagtactgt

SEQ ID NO: 4 - RNA, 20 nt, synthetic construct
  source 1..20: mol_type = other RNA
gctcagccaggtagtactgt

SEQ ID NO: 5 - RNA, 21 nt, synthetic construct
  source 1..21: mol_type = other RNA
ggctcagccaggtagtactgt

SEQ ID NO: 6 - RNA, 22 nt, synthetic construct
  source 1..22: mol_type = other RNA
tggctcagccaggtagtactgt

SEQ ID NO: 7-11 - skipped (5 entries)

SEQ ID NO: 12 - RNA, 10 nt, synthetic construct
  source 1..10: mol_type = other RNA
gtactacctg

SEQ ID NO: 13 - RNA, 11 nt, synthetic construct
  source 1..11: mol_type = other RNA
gtactacctgg

SEQ ID NO: 14 - RNA, 12 nt, synthetic construct
  source 1..12: mol_type = other RNA
gtactacctggc

SEQ ID NO: 15 - RNA, 13 nt, synthetic construct
  source 1..13: mol_type = other RNA
gtactacctggct

SEQ ID NO: 16 - RNA, 14 nt, synthetic construct
  source 1..14: mol_type = other RNA
gtactacctggctg

SEQ ID NO: 17 - RNA, 15 nt, synthetic construct
  source 1..15: mol_type = other RNA
gtactacctggctga

SEQ ID NO: 18 - RNA, 16 nt, synthetic construct
  source 1..16: mol_type = other RNA
gtactacctggctgag

SEQ ID NO: 19 - RNA, 17 nt, synthetic construct
  source 1..17: mol_type = other RNA
gtactacctggctgagc

SEQ ID NO: 20 - RNA, 18 nt, synthetic construct
  source 1..18: mol_type = other RNA
gtactacctggctgagcc

SEQ ID NO: 21 - RNA, 19 nt, synthetic construct
  source 1..19: mol_type = other RNA
gtactacctggctgagcca

SEQ ID NO: 22 - RNA, 16 nt, synthetic construct
  source 1..16: mol_type = other RNA
ccttcgagtacccaca

SEQ ID NO: 23 - RNA, 16 nt, synthetic construct
  source 1..16: mol_type = other RNA
ccttcgagtatccaca

SEQ ID NO: 24 - RNA, 17 nt, synthetic construct
  source 1..17: mol_type = other RNA
cccttcgagtacccaca

SEQ ID NO: 25 - RNA, 17 nt, synthetic construct
  source 1..17: mol_type = other RNA
cccttcgagtatccaca

SEQ ID NO: 26 - RNA, 18 nt, synthetic construct
  source 1..18: mol_type = other RNA
ccccttcgagtacccaca

SEQ ID NO: 27 - RNA, 18 nt, synthetic construct
  source 1..18: mol_type = other RNA
ccccttcgagtatccaca

SEQ ID NO: 28 - RNA, 19 nt, synthetic construct
  source 1..19: mol_type = other RNA
gccccttcgagtacccaca

SEQ ID NO: 29 - RNA, 19 nt, synthetic construct
  source 1..19: mol_type = other RNA
gccccttcgagtatccaca

SEQ ID NO: 30 - RNA, 20 nt, synthetic construct
  source 1..20: mol_type = other RNA
agccccttcgagtacccaca

SEQ ID NO: 31 - RNA, 20 nt, synthetic construct
  source 1..20: mol_type = other RNA
agccccttcgagtatccaca

SEQ ID NO: 32 - RNA, 21 nt, synthetic construct
  source 1..21: mol_type = other RNA
cagccccttcgagtacccaca

SEQ ID NO: 33 - RNA, 21 nt, synthetic construct
  source 1..21: mol_type = other RNA
cagccccttcgagtatccaca

SEQ ID NO: 34 - RNA, 22 nt, synthetic construct
  source 1..22: mol_type = other RNA
gcagccccttcgagtacccaca

SEQ ID NO: 35 - RNA, 22 nt, synthetic construct
  source 1..22: mol_type = other RNA
gcagccccttcgagtatccaca

SEQ ID NO: 36 - RNA, 23 nt, synthetic construct
  source 1..23: mol_type = other RNA
cgcagccccttcgagtacccaca

SEQ ID NO: 37 - RNA, 23 nt, synthetic construct
  source 1..23: mol_type = other RNA
cgcagccccttcgagtatccaca

SEQ ID NO: 38 - RNA, 24 nt, synthetic construct
  source 1..24: mol_type = other RNA
acgcagccccttcgagtacccaca

SEQ ID NO: 39 - RNA, 24 nt, synthetic construct
  source 1..24: mol_type = other RNA
acgcagccccttcgagtatccaca

SEQ ID NO: 40 - RNA, 25 nt, synthetic construct
  source 1..25: mol_type = other RNA
tacgcagccccttcgagtacccaca

SEQ ID NO: 41 - RNA, 25 nt, synthetic construct
  source 1..25: mol_type = other RNA
tacgcagccccttcgagtatccaca

SEQ ID NO: 42 - RNA, 26 nt, synthetic construct
  source 1..26: mol_type = other RNA
gtacgcagccccttcgagtacccaca

SEQ ID NO: 43 - RNA, 26 nt, synthetic construct
  source 1..26: mol_type = other RNA
gtacgcagccccttcgagtatccaca

SEQ ID NO: 44 - RNA, 27 nt, synthetic construct
  source 1..27: mol_type = other RNA
ggtacgcagccccttcgagtacccaca

SEQ ID NO: 45 - RNA, 27 nt, synthetic construct
  source 1..27: mol_type = other RNA
ggtacgcagccccttcgagtatccaca

SEQ ID NO: 46 - RNA, 28 nt, synthetic construct
  source 1..28: mol_type = other RNA
tggtacgcagccccttcgagtacccaca

SEQ ID NO: 47 - RNA, 28 nt, synthetic construct
  source 1..28: mol_type = other RNA
tggtacgcagccccttcgagtatccaca

SEQ ID NO: 48 - RNA, 29 nt, synthetic construct
  source 1..29: mol_type = other RNA
gtggtacgcagccccttcgagtacccaca

SEQ ID NO: 49 - RNA, 29 nt, synthetic construct
  source 1..29: mol_type = other RNA
gtggtacgcagccccttcgagtatccaca

SEQ ID NO: 50 - RNA, 30 nt, synthetic construct
  source 1..30: mol_type = other RNA
tgtggtacgcagccccttcgagtacccaca

SEQ ID NO: 51 - RNA, 30 nt, synthetic construct
  source 1..30: mol_type = other RNA
tgtggtacgcagccccttcgagtatccaca

SEQ ID NO: 52 - RNA, 31 nt, synthetic construct
  source 1..31: mol_type = other RNA
gtgtggtacgcagccccttcgagtacccaca

SEQ ID NO: 53 - RNA, 31 nt, synthetic construct
  source 1..31: mol_type = other RNA
gtgtggtacgcagccccttcgagtatccaca

SEQ ID NO: 54 - RNA, 32 nt, synthetic construct
  source 1..32: mol_type = other RNA
ggtgtggtacgcagccccttcgagtacccaca

SEQ ID NO: 55 - RNA, 32 nt, synthetic construct
  source 1..32: mol_type = other RNA
ggtgtggtacgcagccccttcgagtatccaca

SEQ ID NO: 56 - RNA, 33 nt, synthetic construct
  source 1..33: mol_type = other RNA
gggtgtggtacgcagccccttcgagtacccaca

SEQ ID NO: 57 - RNA, 33 nt, synthetic construct
  source 1..33: mol_type = other RNA
gggtgtggtacgcagccccttcgagtatccaca

SEQ ID NO: 58 - RNA, 34 nt, synthetic construct
  source 1..34: mol_type = other RNA
cgggtgtggtacgcagccccttcgagtacccaca

SEQ ID NO: 59 - RNA, 34 nt, synthetic construct
  source 1..34: mol_type = other RNA
cgggtgtggtacgcagccccttcgagtatccaca

SEQ ID NO: 60 - RNA, 35 nt, synthetic construct
  source 1..35: mol_type = other RNA
acgggtgtggtacgcagccccttcgagtacccaca

SEQ ID NO: 61 - RNA, 35 nt, synthetic construct
  source 1..35: mol_type = other RNA
acgggtgtggtacgcagccccttcgagtatccaca

SEQ ID NO: 62 - RNA, 36 nt, synthetic construct
  source 1..36: mol_type = other RNA
gacgggtgtggtacgcagccccttcgagtacccaca

SEQ ID NO: 63 - RNA, 36 nt, synthetic construct
  source 1..36: mol_type = other RNA
gacgggtgtggtacgcagccccttcgagtatccaca

SEQ ID NO: 64 - RNA, 37 nt, synthetic construct
  source 1..37: mol_type = other RNA
cgacgggtgtggtacgcagccccttcgagtacccaca

SEQ ID NO: 65 - RNA, 37 nt, synthetic construct
  source 1..37: mol_type = other RNA
cgacgggtgtggtacgcagccccttcgagtatccaca

SEQ ID NO: 66 - RNA, 38 nt, synthetic construct
  source 1..38: mol_type = other RNA
gcgacgggtgtggtacgcagccccttcgagtacccaca

SEQ ID NO: 67 - RNA, 38 nt, synthetic construct
  source 1..38: mol_type = other RNA
gcgacgggtgtggtacgcagccccttcgagtatccaca

SEQ ID NO: 68 - RNA, 39 nt, synthetic construct
  source 1..39: mol_type = other RNA
tgcgacgggtgtggtacgcagccccttcgagtacccaca

SEQ ID NO: 69 - RNA, 39 nt, synthetic construct
  source 1..39: mol_type = other RNA
tgcgacgggtgtggtacgcagccccttcgagtatccaca

SEQ ID NO: 70 - RNA, 40 nt, synthetic construct
  source 1..40: mol_type = other RNA
atgcgacgggtgtggtacgcagccccttcgagtacccaca

SEQ ID NO: 71 - RNA, 40 nt, synthetic construct
  source 1..40: mol_type = other RNA
atgcgacgggtgtggtacgcagccccttcgagtatccaca

SEQ ID NO: 72 - RNA, 20 nt, synthetic construct
  source 1..20: mol_type = other RNA
acaagggccacagccatgaa

SEQ ID NO: 73 - RNA, 20 nt, synthetic construct
  source 1..20: mol_type = other RNA
acagccatgaatggcacaga

SEQ ID NO: 74 - RNA, 20 nt, synthetic construct
  source 1..20: mol_type = other RNA
cagccacgggtcagccacaa

SEQ ID NO: 75 - RNA, 20 nt, synthetic construct
  source 1..20: mol_type = other RNA
cgtgcccttctccaatgcga

SEQ ID NO: 76 - RNA, 20 nt, synthetic construct
  source 1..20: mol_type = other RNA
cttctccaatgcgacgggtg

SEQ ID NO: 77 - RNA, 20 nt, synthetic construct
  source 1..20: mol_type = other RNA
gcagccacgggtcagccaca

SEQ ID NO: 78 - RNA, 20 nt, synthetic construct
  source 1..20: mol_type = other RNA
gtgcccttctccaatgcgac

SEQ ID NO: 79 - RNA, 20 nt, synthetic construct
  source 1..20: mol_type = other RNA
tcttgggtgggagcagccac

SEQ ID NO: 80 - RNA, 20 nt, synthetic construct
  source 1..20: mol_type = other RNA
ttcttgggtgggagcagcca

SEQ ID NO: 81 - RNA, 20 nt, synthetic construct
  source 1..20: mol_type = other RNA
cgagtatccacagtactacc

SEQ ID NO: 82 - RNA, 20 nt, synthetic construct
  source 1..20: mol_type = other RNA
cgagtacccacagtactacc

SEQ ID NO: 83 - RNA, 124 nt, synthetic construct
  source 1..124: mol_type = other RNA
gctcagccaggtagtactgtgttttagagctagaaatagcaagttaaaataaggctagtccgttatcaacttgaaaaagtggcaccgagtcggtgcagccccttcgagtacccacagtactacc

SEQ ID NO: 84 - RNA, 126 nt, synthetic construct
  source 1..126: mol_type = other RNA
gctcagccaggtagtactgtgttttagagctagaaatagcaagttaaaataaggctagtccgttatcaacttgaaaaagtggcaccgagtcggtgcagccccttcgagtacccacagtactacctg

SEQ ID NO: 85 - RNA, 126 nt, synthetic construct
  source 1..126: mol_type = other RNA
gctcagccaggtagtactgtgttttagagctagaaatagcaagttaaaataaggctagtccgttatcaacttgaaaaagtggcaccgagtcggtgcgcagccccttcgagtacccacagtactacc

SEQ ID NO: 86 - RNA, 127 nt, synthetic construct
  source 1..127: mol_type = other RNA
gctcagccaggtagtactgtgttttagagctagaaatagcaagttaaaataaggctagtccgttatcaacttgaaaaagtggcaccgagtcggtgcagccccttcgagtacccacagtactacctgg

SEQ ID NO: 87 - RNA, 127 nt, synthetic construct
  source 1..127: mol_type = other RNA
gctcagccaggtagtactgtgttttagagctagaaatagcaagttaaaataaggctagtccgttatcaacttgaaaaagtggcaccgagtcggtgcgcagccccttcgagtacccacagtactacct

SEQ ID NO: 88 - RNA, 127 nt, synthetic construct
  source 1..127: mol_type = other RNA
gctcagccaggtagtactgtgttttagagctagaaatagcaagttaaaataaggctagtccgttatcaacttgaaaaagtggcaccgagtcggtgcagccccttcgagtatccacagtactacctgg

SEQ ID NO: 89 - RNA, 127 nt, synthetic construct
  source 1..127: mol_type = other RNA
gctcagccaggtagtactgtgttttagagctagaaatagcaagttaaaataaggctagtccgttatcaacttgaaaaagtggcaccgagtcggtgcgcagccccttcgagtatccacagtactacct

SEQ ID NO: 90 - RNA, 128 nt, synthetic construct
  source 1..128: mol_type = other RNA
gctcagccaggtagtactgtgttttagagctagaaatagcaagttaaaataaggctagtccgttatcaacttgaaaaagtggcaccgagtcggtgcagccccttcgagtacccacagtactacctttt

SEQ ID NO: 91 - RNA, 128 nt, synthetic construct
  source 1..128: mol_type = other RNA
gctcagccaggtagtactgtgttttagagctagaaatagcaagttaaaataaggctagtccgttatcaacttgaaaaagtggcaccgagtcggtgcagccccttcgagtacccacagtactacctggc

SEQ ID NO: 92 - RNA, 128 nt, synthetic construct
  source 1..128: mol_type = other RNA
gctcagccaggtagtactgtgttttagagctagaaatagcaagttaaaataaggctagtccgttatcaacttgaaaaagtggcaccgagtcggtgcgcagccccttcgagtacccacagtactacctg

SEQ ID NO: 93 - RNA, 128 nt, synthetic construct
  source 1..128: mol_type = other RNA
gctcagccaggtagtactgtgttttagagctagaaatagcaagttaaaataaggctagtccgttatcaacttgaaaaagtggcaccgagtcggtgcacgcagccccttcgagtacccacagtactacc

SEQ ID NO: 94 - RNA, 128 nt, synthetic construct
  source 1..128: mol_type = other RNA
gctcagccaggtagtactgtgttttagagctagaaatagcaagttaaaataaggctagtccgttatcaacttgaaaaagtggcaccgagtcggtgcagccccttcgagtatccacagtactacctggc

SEQ ID NO: 95 - RNA, 128 nt, synthetic construct
  source 1..128: mol_type = other RNA
gctcagccaggtagtactgtgttttagagctagaaatagcaagttaaaataaggctagtccgttatcaacttgaaaaagtggcaccgagtcggtgcgcagccccttcgagtatccacagtactacctg

SEQ ID NO: 96 - RNA, 129 nt, synthetic construct
  source 1..129: mol_type = other RNA
gctcagccaggtagtactgtgttttagagctagaaatagcaagttaaaataaggctagtccgttatcaacttgaaaaagtggcaccgagtcggtgcagccccttcgagtacccacagtactacctggct

SEQ ID NO: 97 - RNA, 129 nt, synthetic construct
  source 1..129: mol_type = other RNA
gctcagccaggtagtactgtgttttagagctagaaatagcaagttaaaataaggctagtccgttatcaacttgaaaaagtggcaccgagtcggtgcgcagccccttcgagtacccacagtactacctgg

SEQ ID NO: 98 - RNA, 129 nt, synthetic construct
  source 1..129: mol_type = other RNA
gctcagccaggtagtactgtgttttagagctagaaatagcaagttaaaataaggctagtccgttatcaacttgaaaaagtggcaccgagtcggtgcagccccttcgagtatccacagtactacctggct

SEQ ID NO: 99 - RNA, 129 nt, synthetic construct
  source 1..129: mol_type = other RNA
gctcagccaggtagtactgtgttttagagctagaaatagcaagttaaaataaggctagtccgttatcaacttgaaaaagtggcaccgagtcggtgcgcagccccttcgagtatccacagtactacctgg

SEQ ID NO: 100 - RNA, 129 nt, synthetic construct
  source 1..129: mol_type = other RNA
gctcagccaggtagtactgtgtttaagagctagaaatagcaagtttaaataaggctagtccgttatcaacttgaaaaagtggcaccgagtcggtgcgcagccccttcgagtacccacagtactacctgg

SEQ ID NO: 101 - RNA, 129 nt, synthetic construct
  source 1..129: mol_type = other RNA
gctcagccaggtagtactgtgtttaagagctagaaatagcaagtttaaataaggctagtccgttatcagcgtgaaaacgcggcaccgagtcggtgcgcagccccttcgagtacccacagtactacctgg

SEQ ID NO: 102 - RNA, 129 nt, synthetic construct
  source 1..129: mol_type = other RNA
gctcagccaggtagtactgtgtttaagagctagaaatagcaagtttaaataaggctagtccgttatcaacttgaaaaagtggcaccgagtcggtgcagccccttcgagtatccacagtactacctggct

SEQ ID NO: 103 - RNA, 129 nt, synthetic construct
  source 1..129: mol_type = other RNA
gctcagccaggtagtactgtgtttaagagctagaaatagcaagtttaaataaggctagtccgttatcagcgtgaaaacgcggcaccgagtcggtgcagccccttcgagtatccacagtactacctggct

SEQ ID NO: 104 - RNA, 130 nt, synthetic construct
  source 1..130: mol_type = other RNA
gctcagccaggtagtactgtgttttagagctagaaatagcaagttaaaataaggctagtccgttatcaacttgaaaaagtggcaccgagtcggtgcgcagccccttcgagtacccacagtactacctttt

SEQ ID NO: 105 - RNA, 130 nt, synthetic construct
  source 1..130: mol_type = other RNA
gctcagccaggtagtactgtgttttagagctagaaatagcaagttaaaataaggctagtccgttatcaacttgaaaaagtggcaccgagtcggtgcagccccttcgagtacccacagtactacctgtttt

SEQ ID NO: 106 - RNA, 130 nt, synthetic construct
  source 1..130: mol_type = other RNA
gctcagccaggtagtactgtgttttagagctagaaatagcaagttaaaataaggctagtccgttatcaacttgaaaaagtggcaccgagtcggtgcagccccttcgagtacccacagtactacctggctg

SEQ ID NO: 107 - RNA, 130 nt, synthetic construct
  source 1..130: mol_type = other RNA
gctcagccaggtagtactgtgttttagagctagaaatagcaagttaaaataaggctagtccgttatcaacttgaaaaagtggcaccgagtcggtgcgcagccccttcgagtacccacagtactacctggc

SEQ ID NO: 108 - RNA, 130 nt, synthetic construct
  source 1..130: mol_type = other RNA
gctcagccaggtagtactgtgttttagagctagaaatagcaagttaaaataaggctagtccgttatcaacttgaaaaagtggcaccgagtcggtgcacgcagccccttcgagtacccacagtactacctg

SEQ ID NO: 109 - RNA, 130 nt, synthetic construct
  source 1..130: mol_type = other RNA
gctcagccaggtagtactgtgttttagagctagaaatagcaagttaaaataaggctagtccgttatcaacttgaaaaagtggcaccgagtcggtgcgtacgcagccccttcgagtacccacagtactacc

SEQ ID NO: 110 - RNA, 130 nt, synthetic construct
  source 1..130: mol_type = other RNA
gctcagccaggtagtactgtgttttagagctagaaatagcaagttaaaataaggctagtccgttatcaacttgaaaaagtggcaccgagtcggtgcagccccttcgagtatccacagtactacctggctg

SEQ ID NO: 111 - RNA, 130 nt, synthetic construct
  source 1..130: mol_type = other RNA
gctcagccaggtagtactgtgttttagagctagaaatagcaagttaaaataaggctagtccgttatcaacttgaaaaagtggcaccgagtcggtgcgcagccccttcgagtatccacagtactacctggc

SEQ ID NO: 112 - RNA, 131 nt, synthetic construct
  source 1..131: mol_type = other RNA
gctcagccaggtagtactgtgttttagagctagaaatagcaagttaaaataaggctagtccgttatcaacttgaaaaagtggcaccgagtcggtgcagccccttcgagtacccacagtactacctggctga

SEQ ID NO: 113 - RNA, 131 nt, synthetic construct
  source 1..131: mol_type = other RNA
gctcagccaggtagtactgtgttttagagctagaaatagcaagttaaaataaggctagtccgttatcaacttgaaaaagtggcaccgagtcggtgcgcagccccttcgagtacccacagtactacctggct

SEQ ID NO: 114 - RNA, 131 nt, synthetic construct
  source 1..131: mol_type = other RNA
gctcagccaggtagtactgtgttttagagctagaaatagcaagttaaaataaggctagtccgttatcaacttgaaaaagtggcaccgagtcggtgcagccccttcgagtatccacagtactacctggctga

SEQ ID NO: 115 - RNA, 131 nt, synthetic construct
  source 1..131: mol_type = other RNA
gctcagccaggtagtactgtgttttagagctagaaatagcaagttaaaataaggctagtccgttatcaacttgaaaaagtggcaccgagtcggtgcgcagccccttcgagtatccacagtactacctggct

SEQ ID NO: 116 - RNA, 131 nt, synthetic construct
  source 1..131: mol_type = other RNA
gctcagccaggtagtactgtgtttaagagcggggaaatccgcaagtttaaataaggctagtccgttatcagcgtgaaaacgcggcaccgagtcggtgcgcagccccttcgagtacccacagtactacctgg

SEQ ID NO: 117 - RNA, 131 nt, synthetic construct
  source 1..131: mol_type = other RNA
gctcagccaggtagtactgtgtttaagagcggggaaatccgcaagtttaaataaggctagtccgttatcagcgtgaaaacgcggcaccgagtcggtgcagccccttcgagtatccacagtactacctggct

SEQ ID NO: 118 - RNA, 131 nt, synthetic construct
  source 1..131: mol_type = other RNA
gctcagccaggtagtactgtgtttaagagctagaaatagcaagtttaaataaggctagtccgttatcaacttgaaaaagtggcaccgagtcggtgcagccccttcgagtatccacagtactacctggctga

SEQ ID NO: 119 - RNA, 131 nt, synthetic construct
  source 1..131: mol_type = other RNA
gctcagccaggtagtactgtgtttaagagctagaaatagcaagtttaaataaggctagtccgttatcagcgtgaaaacgcggcaccgagtcggtgcagccccttcgagtatccacagtactacctggctga

SEQ ID NO: 120 - RNA, 132 nt, synthetic construct
  source 1..132: mol_type = other RNA
gctcagccaggtagtactgtgttttagagctagaaatagcaagttaaaataaggctagtccgttatcaacttgaaaaagtggcaccgagtcggtgcacgcagccccttcgagtacccacagtactacctttt

SEQ ID NO: 121 - RNA, 132 nt, synthetic construct
  source 1..132: mol_type = other RNA
gctcagccaggtagtactgtgttttagagctagaaatagcaagttaaaataaggctagtccgttatcaacttgaaaaagtggcaccgagtcggtgcgcagccccttcgagtacccacagtactacctgtttt

SEQ ID NO: 122 - RNA, 132 nt, synthetic construct
  source 1..132: mol_type = other RNA
gctcagccaggtagtactgtgttttagagctagaaatagcaagttaaaataaggctagtccgttatcaacttgaaaaagtggcaccgagtcggtgcagccccttcgagtacccacagtactacctggctttt

SEQ ID NO: 123 - RNA, 132 nt, synthetic construct
  source 1..132: mol_type = other RNA
gctcagccaggtagtactgtgttttagagctagaaatagcaagttaaaataaggctagtccgttatcaacttgaaaaagtggcaccgagtcggtgcgcagccccttcgagtacccacagtactacctggctg

SEQ ID NO: 124 - RNA, 132 nt, synthetic construct
  source 1..132: mol_type = other RNA
gctcagccaggtagtactgtgttttagagctagaaatagcaagttaaaataaggctagtccgttatcaacttgaaaaagtggcaccgagtcggtgcacgcagccccttcgagtacccacagtactacctggc

SEQ ID NO: 125 - RNA, 132 nt, synthetic construct
  source 1..132: mol_type = other RNA
gctcagccaggtagtactgtgttttagagctagaaatagcaagttaaaataaggctagtccgttatcaacttgaaaaagtggcaccgagtcggtgcgtacgcagccccttcgagtacccacagtactacctg

SEQ ID NO: 126 - RNA, 132 nt, synthetic construct
  source 1..132: mol_type = other RNA
gctcagccaggtagtactgtgttttagagctagaaatagcaagttaaaataaggctagtccgttatcaacttgaaaaagtggcaccgagtcggtgctggtacgcagccccttcgagtacccacagtactacc

SEQ ID NO: 127 - RNA, 132 nt, synthetic construct
  source 1..132: mol_type = other RNA
gctcagccaggtagtactgtgttttagagctagaaatagcaagttaaaataaggctagtccgttatcaacttgaaaaagtggcaccgagtcggtgcagccccttcgagtacccacagtactacctggctgag

SEQ ID NO: 128 - RNA, 132 nt, synthetic construct
  source 1..132: mol_type = other RNA
gctcagccaggtagtactgtgttttagagctagaaatagcaagttaaaataaggctagtccgttatcaacttgaaaaagtggcaccgagtcggtgcagccccttcgagtatccacagtactacctggctgag

SEQ ID NO: 129 - RNA, 132 nt, synthetic construct
  source 1..132: mol_type = other RNA
gctcagccaggtagtactgtgttttagagctagaaatagcaagttaaaataaggctagtccgttatcaacttgaaaaagtggcaccgagtcggtgcgcagccccttcgagtatccacagtactacctggctg

SEQ ID NO: 130 - RNA, 133 nt, synthetic construct
  source 1..133: mol_type = other RNA
gctcagccaggtagtactgtgttttagagctagaaatagcaagttaaaataaggctagtccgttatcaacttgaaaaagtggcaccgagtcggtgcgcagccccttcgagtacccacagtactacctggctga

SEQ ID NO: 131 - RNA, 133 nt, synthetic construct
  source 1..133: mol_type = other RNA
gctcagccaggtagtactgtgttttagagctagaaatagcaagttaaaataaggctagtccgttatcaacttgaaaaagtggcaccgagtcggtgcgcagccccttcgagtatccacagtactacctggctga

SEQ ID NO: 132 - RNA, 133 nt, synthetic construct
  source 1..133: mol_type = other RNA
gctcagccaggtagtactgtgtttaagagcggggaaatccgcaagtttaaataaggctagtccgttatcagcgtgaaaacgcggcaccgagtcggtgcagccccttcgagtatccacagtactacctggctga

SEQ ID NO: 133 - RNA, 133 nt, synthetic construct
  source 1..133: mol_type = other RNA
gctcagccaggtagtactgtgtttaagagctagaaatagcaagtttaaataaggctagtccgttatcaacttgaaaaagtggcaccgagtcggtgcgcagccccttcgagtatccacagtactacctggctga

SEQ ID NO: 134 - RNA, 133 nt, synthetic construct
  source 1..133: mol_type = other RNA
gctcagccaggtagtactgtgtttaagagctagaaatagcaagtttaaataaggctagtccgttatcagcgtgaaaacgcggcaccgagtcggtgcgcagccccttcgagtatccacagtactacctggctga

SEQ ID NO: 135 - RNA, 134 nt, synthetic construct
  source 1..134: mol_type = other RNA
gctcagccaggtagtactgtgttttagagctagaaatagcaagttaaaataaggctagtccgttatcaacttgaaaaagtggcaccgagtcggtgcgtacgcagccccttcgagtacccacagtactacctttt

SEQ ID NO: 136 - RNA, 134 nt, synthetic construct
  source 1..134: mol_type = other RNA
gctcagccaggtagtactgtgttttagagctagaaatagcaagttaaaataaggctagtccgttatcaacttgaaaaagtggcaccgagtcggtgcacgcagccccttcgagtacccacagtactacctgtttt

SEQ ID NO: 137 - RNA, 134 nt, synthetic construct
  source 1..134: mol_type = other RNA
gctcagccaggtagtactgtgttttagagctagaaatagcaagttaaaataaggctagtccgttatcaacttgaaaaagtggcaccgagtcggtgcgcagccccttcgagtacccacagtactacctggctttt

SEQ ID NO: 138 - RNA, 134 nt, synthetic construct
  source 1..134: mol_type = other RNA
gctcagccaggtagtactgtgttttagagctagaaatagcaagttaaaataaggctagtccgttatcaacttgaaaaagtggcaccgagtcggtgcagccccttcgagtacccacagtactacctggctgtttt

SEQ ID NO: 139 - RNA, 134 nt, synthetic construct
  source 1..134: mol_type = other RNA
gctcagccaggtagtactgtgttttagagctagaaatagcaagttaaaataaggctagtccgttatcaacttgaaaaagtggcaccgagtcggtgcacgcagccccttcgagtacccacagtactacctggctg

SEQ ID NO: 140 - RNA, 134 nt, synthetic construct
  source 1..134: mol_type = other RNA
gctcagccaggtagtactgtgttttagagctagaaatagcaagttaaaataaggctagtccgttatcaacttgaaaaagtggcaccgagtcggtgcgtacgcagccccttcgagtacccacagtactacctggc

SEQ ID NO: 141 - RNA, 134 nt, synthetic construct
  source 1..134: mol_type = other RNA
gctcagccaggtagtactgtgttttagagctagaaatagcaagttaaaataaggctagtccgttatcaacttgaaaaagtggcaccgagtcggtgctggtacgcagccccttcgagtacccacagtactacctg

SEQ ID NO: 142 - RNA, 134 nt, synthetic construct
  source 1..134: mol_type = other RNA
gctcagccaggtagtactgtgttttagagctagaaatagcaagttaaaataaggctagtccgttatcaacttgaaaaagtggcaccgagtcggtgctgtggtacgcagccccttcgagtacccacagtactacc

SEQ ID NO: 143 - RNA, 134 nt, synthetic construct
  source 1..134: mol_type = other RNA
gctcagccaggtagtactgtgttttagagctagaaatagcaagttaaaataaggctagtccgttatcaacttgaaaaagtggcaccgagtcggtgcgcagccccttcgagtacccacagtactacctggctgag

SEQ ID NO: 144 - RNA, 134 nt, synthetic construct
  source 1..134: mol_type = other RNA
gctcagccaggtagtactgtgttttagagctagaaatagcaagttaaaataaggctagtccgttatcaacttgaaaaagtggcaccgagtcggtgcgcagccccttcgagtatccacagtactacctggctgag

SEQ ID NO: 145 - RNA, 135 nt, synthetic construct
  source 1..135: mol_type = other RNA
gctcagccaggtagtactgtgtttaagagcggggaaatccgcaagtttaaataaggctagtccgttatcagcgtgaaaacgcggcaccgagtcggtgcgcagccccttcgagtatccacagtactacctggctga

SEQ ID NO: 146 - RNA, 136 nt, synthetic construct
  source 1..136: mol_type = other RNA
gctcagccaggtagtactgtgtttaagagctagaaatagcaagtttaaataaggctagtccgttatcagcgtgaaaacgcggcaccgagtcggtgcgcagccccttcgagtacccacagtactacctggttttttt

SEQ ID NO: 147 - RNA, 136 nt, synthetic construct
  source 1..136: mol_type = other RNA
gctcagccaggtagtactgtgtttaagagctagaaatagcaagtttaaataaggctagtccgttatcagcgtgaaaacgcggcaccgagtcggtgcagccccttcgagtatccacagtactacctggctttttttt

SEQ ID NO: 148 - RNA, 136 nt, synthetic construct
  source 1..136: mol_type = other RNA
gctcagccaggtagtactgtgttttagagctagaaatagcaagttaaaataaggctagtccgttatcaacttgaaaaagtggcaccgagtcggtgcgtacgcagccccttcgagtacccacagtactacctgtttt

SEQ ID NO: 149 - RNA, 136 nt, synthetic construct
  source 1..136: mol_type = other RNA
gctcagccaggtagtactgtgttttagagctagaaatagcaagttaaaataaggctagtccgttatcaacttgaaaaagtggcaccgagtcggtgcacgcagccccttcgagtacccacagtactacctggctttt

SEQ ID NO: 150 - RNA, 136 nt, synthetic construct
  source 1..136: mol_type = other RNA
gctcagccaggtagtactgtgttttagagctagaaatagcaagttaaaataaggctagtccgttatcaacttgaaaaagtggcaccgagtcggtgcgcagccccttcgagtacccacagtactacctggctgtttt

SEQ ID NO: 151 - RNA, 136 nt, synthetic construct
  source 1..136: mol_type = other RNA
gctcagccaggtagtactgtgttttagagctagaaatagcaagttaaaataaggctagtccgttatcaacttgaaaaagtggcaccgagtcggtgcgtacgcagccccttcgagtacccacagtactacctggctg

SEQ ID NO: 152 - RNA, 136 nt, synthetic construct
  source 1..136: mol_type = other RNA
gctcagccaggtagtactgtgttttagagctagaaatagcaagttaaaataaggctagtccgttatcaacttgaaaaagtggcaccgagtcggtgctggtacgcagccccttcgagtacccacagtactacctggc

SEQ ID NO: 153 - RNA, 136 nt, synthetic construct
  source 1..136: mol_type = other RNA
gctcagccaggtagtactgtgttttagagctagaaatagcaagttaaaataaggctagtccgttatcaacttgaaaaagtggcaccgagtcggtgctgtggtacgcagccccttcgagtacccacagtactacctg

SEQ ID NO: 154 - RNA, 138 nt, synthetic construct
  source 1..138: mol_type = other RNA
gctcagccaggtagtactgtgtttaagagctagaaatagcaagtttaaataaggctagtccgttatcagcgtgaaaacgcggcaccgagtcggtgcagccccttcgagtatccacagtactacctggctgattttttt

SEQ ID NO: 155 - RNA, 138 nt, synthetic construct
  source 1..138: mol_type = other RNA
gctcagccaggtagtactgtgttttagagctagaaatagcaagttaaaataaggctagtccgttatcaacttgaaaaagtggcaccgagtcggtgcgtacgcagccccttcgagtacccacagtactacctggctttt

SEQ ID NO: 156 - RNA, 138 nt, synthetic construct
  source 1..138: mol_type = other RNA
gctcagccaggtagtactgtgttttagagctagaaatagcaagttaaaataaggctagtccgttatcaacttgaaaaagtggcaccgagtcggtgcacgcagccccttcgagtacccacagtactacctggctgtttt

SEQ ID NO: 157 - RNA, 138 nt, synthetic construct
  source 1..138: mol_type = other RNA
gctcagccaggtagtactgtgttttagagctagaaatagcaagttaaaataaggctagtccgttatcaacttgaaaaagtggcaccgagtcggtgctggtacgcagccccttcgagtacccacagtactacctggctg

SEQ ID NO: 158 - RNA, 138 nt, synthetic construct
  source 1..138: mol_type = other RNA
gctcagccaggtagtactgtgttttagagctagaaatagcaagttaaaataaggctagtccgttatcaacttgaaaaagtggcaccgagtcggtgctgtggtacgcagccccttcgagtacccacagtactacctggc

SEQ ID NO: 159 - RNA, 139 nt, synthetic construct
  source 1..139: mol_type = other RNA
gctcagccaggtagtactgtgtttaagagctatgctggaaacagcatagcaagtttaaataaggctagtccgttatcaacttgaaaaagtggcaccgagtcggtgcgcagccccttcgagtacccacagtactacctgg

SEQ ID NO: 160 - RNA, 139 nt, synthetic construct
  source 1..139: mol_type = other RNA
gctcagccaggtagtactgtgtttaagagctatgctggaaacagcatagcaagtttaaataaggctagtccgttatcagcgtgaaaacgcggcaccgagtcggtgcgcagccccttcgagtacccacagtactacctgg

SEQ ID NO: 161 - RNA, 139 nt, synthetic construct
  source 1..139: mol_type = other RNA
gctcagccaggtagtactgtgtttaagagctatgctggaaacagcatagcaagtttaaataaggctagtccgttatcaacttgaaaaagtggcaccgagtcggtgcagccccttcgagtatccacagtactacctggct

SEQ ID NO: 162 - RNA, 139 nt, synthetic construct
  source 1..139: mol_type = other RNA
gctcagccaggtagtactgtgtttaagagctatgctggaaacagcatagcaagtttaaataaggctagtccgttatcagcgtgaaaacgcggcaccgagtcggtgcagccccttcgagtatccacagtactacctggct

SEQ ID NO: 163 - RNA, 140 nt, synthetic construct
  source 1..140: mol_type = other RNA
gctcagccaggtagtactgtgtttaagagctagaaatagcaagtttaaataaggctagtccgttatcagcgtgaaaacgcggcaccgagtcggtgcgcagccccttcgagtatccacagtactacctggctgattttttt

SEQ ID NO: 164 - RNA, 140 nt, synthetic construct
  source 1..140: mol_type = other RNA
gctcagccaggtagtactgtgttttagagctagaaatagcaagttaaaataaggctagtccgttatcaacttgaaaaagtggcaccgagtcggtgcgtacgcagccccttcgagtacccacagtactacctggctgtttt

SEQ ID NO: 165 - RNA, 140 nt, synthetic construct
  source 1..140: mol_type = other RNA
gctcagccaggtagtactgtgttttagagctagaaatagcaagttaaaataaggctagtccgttatcaacttgaaaaagtggcaccgagtcggtgctgtggtacgcagccccttcgagtacccacagtactacctggctg

SEQ ID NO: 166 - RNA, 141 nt, synthetic construct
  source 1..141: mol_type = other RNA
gctcagccaggtagtactgtgtttaagagctatgctggaaacagcatagcaagtttaaataaggctagtccgttatcaacttgaaaaagtggcaccgagtcggtgcagccccttcgagtatccacagtactacctggctga

SEQ ID NO: 167 - RNA, 141 nt, synthetic construct
  source 1..141: mol_type = other RNA
gctcagccaggtagtactgtgtttaagagctatgctggaaacagcatagcaagtttaaataaggctagtccgttatcagcgtgaaaacgcggcaccgagtcggtgcagccccttcgagtatccacagtactacctggctga

SEQ ID NO: 168 - RNA, 143 nt, synthetic construct
  source 1..143: mol_type = other RNA
gctcagccaggtagtactgtgtttaagagctatgctggaaacagcatagcaagtttaaataaggctagtccgttatcaacttgaaaaagtggcaccgagtcggtgcgcagccccttcgagtatccacagtactacctggctga

SEQ ID NO: 169 - RNA, 143 nt, synthetic construct
  source 1..143: mol_type = other RNA
gctcagccaggtagtactgtgtttaagagctatgctggaaacagcatagcaagtttaaataaggctagtccgttatcagcgtgaaaacgcggcaccgagtcggtgcgcagccccttcgagtatccacagtactacctggctga

SEQ ID NO: 170 - RNA, 148 nt, synthetic construct
  source 1..148: mol_type = other RNA
gctcagccaggtagtactgtgtttaagagctagaaatagcaagtttaaataaggctagtccgttatcagcgtgaaaacgcggcaccgagtcggtgcgcagccccttcgagtacccacagtactacctggattcgtggctgcttttttt

SEQ ID NO: 171 - RNA, 148 nt, synthetic construct
  source 1..148: mol_type = other RNA
gctcagccaggtagtactgtgtttaagagctagaaatagcaagtttaaataaggctagtccgttatcagcgtgaaaacgcggcaccgagtcggtgcgcagccccttcgagtacccacagtactacctggaatacagggctgttttttt

SEQ ID NO: 172 - RNA, 148 nt, synthetic construct
  source 1..148: mol_type = other RNA
gctcagccaggtagtactgtgtttaagagctagaaatagcaagtttaaataaggctagtccgttatcagcgtgaaaacgcggcaccgagtcggtgcgcagccccttcgagtacccacagtactacctggatagtgggggctttttttt

SEQ ID NO: 173 - RNA, 148 nt, synthetic construct
  source 1..148: mol_type = other RNA
gctcagccaggtagtactgtgtttaagagctagaaatagcaagtttaaataaggctagtccgttatcagcgtgaaaacgcggcaccgagtcggtgcgcagccccttcgagtacccacagtactacctggagaaagaggggcttttttt

SEQ ID NO: 174 - RNA, 148 nt, synthetic construct
  source 1..148: mol_type = other RNA
gctcagccaggtagtactgtgtttaagagctagaaatagcaagtttaaataaggctagtccgttatcagcgtgaaaacgcggcaccgagtcggtgcgcagccccttcgagtacccacagtactacctggaataaaaaggggttttttt

SEQ ID NO: 175 - RNA, 148 nt, synthetic construct
  source 1..148: mol_type = other RNA
gctcagccaggtagtactgtgtttaagagctagaaatagcaagtttaaataaggctagtccgttatcagcgtgaaaacgcggcaccgagtcggtgcgcagccccttcgagtacccacagtactacctggaataatgaagggttttttt

SEQ ID NO: 176 - RNA, 148 nt, synthetic construct
  source 1..148: mol_type = other RNA
gctcagccaggtagtactgtgtttaagagctagaaatagcaagtttaaataaggctagtccgttatcagcgtgaaaacgcggcaccgagtcggtgcgcagccccttcgagtacccacagtactacctggattcaacgaaggttttttt

SEQ ID NO: 177 - RNA, 148 nt, synthetic construct
  source 1..148: mol_type = other RNA
gctcagccaggtagtactgtgtttaagagctagaaatagcaagtttaaataaggctagtccgttatcagcgtgaaaacgcggcaccgagtcggtgcgcagccccttcgagtacccacagtactacctggaccttgtcgaagttttttt

SEQ ID NO: 178 - RNA, 148 nt, synthetic construct
  source 1..148: mol_type = other RNA
gctcagccaggtagtactgtgtttaagagctagaaatagcaagtttaaataaggctagtccgttatcagcgtgaaaacgcggcaccgagtcggtgcgcagccccttcgagtacccacagtactacctggacctctctcgaattttttt

SEQ ID NO: 179 - RNA, 148 nt, synthetic construct
  source 1..148: mol_type = other RNA
gctcagccaggtagtactgtgtttaagagctagaaatagcaagtttaaataaggctagtccgttatcagcgtgaaaacgcggcaccgagtcggtgcgcagccccttcgagtacccacagtactacctggaactagactcgattttttt

SEQ ID NO: 180 - RNA, 148 nt, synthetic construct
  source 1..148: mol_type = other RNA
gctcagccaggtagtactgtgtttaagagctagaaatagcaagtttaaataaggctagtccgttatcagcgtgaaaacgcggcaccgagtcggtgcgcagccccttcgagtacccacagtactacctggaagtcgtactcgttttttt

SEQ ID NO: 181 - RNA, 148 nt, synthetic construct
  source 1..148: mol_type = other RNA
gctcagccaggtagtactgtgtttaagagctagaaatagcaagtttaaataaggctagtccgttatcagcgtgaaaacgcggcaccgagtcggtgcgcagccccttcgagtacccacagtactacctggaagtccgtactcttttttt

SEQ ID NO: 182 - RNA, 148 nt, synthetic construct
  source 1..148: mol_type = other RNA
gctcagccaggtagtactgtgtttaagagctagaaatagcaagtttaaataaggctagtccgttatcagcgtgaaaacgcggcaccgagtcggtgcgcagccccttcgagtacccacagtactacctggatagatggtactttttttt

SEQ ID NO: 183 - RNA, 148 nt, synthetic construct
  source 1..148: mol_type = other RNA
gctcagccaggtagtactgtgtttaagagctagaaatagcaagtttaaataaggctagtccgttatcagcgtgaaaacgcggcaccgagtcggtgcgcagccccttcgagtacccacagtactacctggaaaaacgggtacttttttt

SEQ ID NO: 184 - RNA, 148 nt, synthetic construct
  source 1..148: mol_type = other RNA
gctcagccaggtagtactgtgtttaagagctagaaatagcaagtttaaataaggctagtccgttatcagcgtgaaaacgcggcaccgagtcggtgcgcagccccttcgagtacccacagtactacctggaaaaaatgggtattttttt

SEQ ID NO: 185 - RNA, 148 nt, synthetic construct
  source 1..148: mol_type = other RNA
gctcagccaggtagtactgtgtttaagagctagaaatagcaagtttaaataaggctagtccgttatcagcgtgaaaacgcggcaccgagtcggtgcgcagccccttcgagtacccacagtactacctggatcatggtgggtttttttt

SEQ ID NO: 186 - RNA, 148 nt, synthetic construct
  source 1..148: mol_type = other RNA
gctcagccaggtagtactgtgtttaagagctagaaatagcaagtttaaataaggctagtccgttatcagcgtgaaaacgcggcaccgagtcggtgcgcagccccttcgagtacccacagtactacctggaaaaaatgtgggttttttt

SEQ ID NO: 187 - RNA, 148 nt, synthetic construct
  source 1..148: mol_type = other RNA
gctcagccaggtagtactgtgtttaagagctagaaatagcaagtttaaataaggctagtccgttatcagcgtgaaaacgcggcaccgagtcggtgcagccccttcgagtatccacagtactacctggctaacactggggctttttttt

SEQ ID NO: 188 - RNA, 148 nt, synthetic construct
  source 1..148: mol_type = other RNA
gctcagccaggtagtactgtgtttaagagctagaaatagcaagtttaaataaggctagtccgttatcagcgtgaaaacgcggcaccgagtcggtgcagccccttcgagtatccacagtactacctggcttcacaaaggggcttttttt

SEQ ID NO: 189 - RNA, 148 nt, synthetic construct
  source 1..148: mol_type = other RNA
gctcagccaggtagtactgtgtttaagagctagaaatagcaagtttaaataaggctagtccgttatcagcgtgaaaacgcggcaccgagtcggtgcagccccttcgagtatccacagtactacctggcttcatagaaggggttttttt

SEQ ID NO: 190 - RNA, 148 nt, synthetic construct
  source 1..148: mol_type = other RNA
gctcagccaggtagtactgtgtttaagagctagaaatagcaagtttaaataaggctagtccgttatcagcgtgaaaacgcggcaccgagtcggtgcagccccttcgagtatccacagtactacctggcttcaaaagaagggttttttt

SEQ ID NO: 191 - RNA, 148 nt, synthetic construct
  source 1..148: mol_type = other RNA
gctcagccaggtagtactgtgtttaagagctagaaatagcaagtttaaataaggctagtccgttatcagcgtgaaaacgcggcaccgagtcggtgcagccccttcgagtatccacagtactacctggctccaaatcgaaggttttttt

SEQ ID NO: 192 - RNA, 148 nt, synthetic construct
  source 1..148: mol_type = other RNA
gctcagccaggtagtactgtgtttaagagctagaaatagcaagtttaaataaggctagtccgttatcagcgtgaaaacgcggcaccgagtcggtgcagccccttcgagtatccacagtactacctggctcccctgtcgaagttttttt

SEQ ID NO: 193 - RNA, 148 nt, synthetic construct
  source 1..148: mol_type = other RNA
gctcagccaggtagtactgtgtttaagagctagaaatagcaagtttaaataaggctagtccgttatcagcgtgaaaacgcggcaccgagtcggtgcagccccttcgagtatccacagtactacctggctctattcctcgaattttttt

SEQ ID NO: 194 - RNA, 148 nt, synthetic construct
  source 1..148: mol_type = other RNA
gctcagccaggtagtactgtgtttaagagctagaaatagcaagtttaaataaggctagtccgttatcagcgtgaaaacgcggcaccgagtcggtgcagccccttcgagtatccacagtactacctggctactcccactcgattttttt

SEQ ID NO: 195 - RNA, 148 nt, synthetic construct
  source 1..148: mol_type = other RNA
gctcagccaggtagtactgtgtttaagagctagaaatagcaagtttaaataaggctagtccgttatcagcgtgaaaacgcggcaccgagtcggtgcagccccttcgagtatccacagtactacctggcttacttctactcgttttttt

SEQ ID NO: 196 - RNA, 148 nt, synthetic construct
  source 1..148: mol_type = other RNA
gctcagccaggtagtactgtgtttaagagctagaaatagcaagtttaaataaggctagtccgttatcagcgtgaaaacgcggcaccgagtcggtgcagccccttcgagtatccacagtactacctggctcttgatatactcttttttt

SEQ ID NO: 197 - RNA, 148 nt, synthetic construct
  source 1..148: mol_type = other RNA
gctcagccaggtagtactgtgtttaagagctagaaatagcaagtttaaataaggctagtccgttatcagcgtgaaaacgcggcaccgagtcggtgcagccccttcgagtatccacagtactacctggctcttcttgatactttttttt

SEQ ID NO: 198 - RNA, 148 nt, synthetic construct
  source 1..148: mol_type = other RNA
gctcagccaggtagtactgtgtttaagagctagaaatagcaagtttaaataaggctagtccgttatcagcgtgaaaacgcggcaccgagtcggtgcagccccttcgagtatccacagtactacctggctcacctcggatacttttttt

SEQ ID NO: 199 - RNA, 148 nt, synthetic construct
  source 1..148: mol_type = other RNA
gctcagccaggtagtactgtgtttaagagctagaaatagcaagtttaaataaggctagtccgttatcagcgtgaaaacgcggcaccgagtcggtgcagccccttcgagtatccacagtactacctggctcacccctggatattttttt

SEQ ID NO: 200 - RNA, 148 nt, synthetic construct
  source 1..148: mol_type = other RNA
gctcagccaggtagtactgtgtttaagagctagaaatagcaagtttaaataaggctagtccgttatcagcgtgaaaacgcggcaccgagtcggtgcagccccttcgagtatccacagtactacctggctttctatgtggatttttttt

SEQ ID NO: 201 - RNA, 148 nt, synthetic construct
  source 1..148: mol_type = other RNA
gctcagccaggtagtactgtgtttaagagctagaaatagcaagtttaaataaggctagtccgttatcagcgtgaaaacgcggcaccgagtcggtgcagccccttcgagtatccacagtactacctggctcaattctgtggattttttt

SEQ ID NO: 202 - RNA, 150 nt, synthetic construct
  source 1..150: mol_type = other RNA
gctcagccaggtagtactgtgtttaagagctagaaatagcaagtttaaataaggctagtccgttatcagcgtgaaaacgcggcaccgagtcggtgcgcagccccttcgagtacccacagtactacctggatagtgggggctgcttttttt

SEQ ID NO: 203 - RNA, 150 nt, synthetic construct
  source 1..150: mol_type = other RNA
gctcagccaggtagtactgtgtttaagagctagaaatagcaagtttaaataaggctagtccgttatcagcgtgaaaacgcggcaccgagtcggtgcgcagccccttcgagtacccacagtactacctggagaaagaggggctgttttttt

SEQ ID NO: 204 - RNA, 150 nt, synthetic construct
  source 1..150: mol_type = other RNA
gctcagccaggtagtactgtgtttaagagctagaaatagcaagtttaaataaggctagtccgttatcagcgtgaaaacgcggcaccgagtcggtgcgcagccccttcgagtacccacagtactacctggaagaaaaaggggctttttttt

SEQ ID NO: 205 - RNA, 150 nt, synthetic construct
  source 1..150: mol_type = other RNA
gctcagccaggtagtactgtgtttaagagctagaaatagcaagtttaaataaggctagtccgttatcagcgtgaaaacgcggcaccgagtcggtgcgcagccccttcgagtacccacagtactacctggaagaatgaaggggcttttttt

SEQ ID NO: 206 - RNA, 150 nt, synthetic construct
  source 1..150: mol_type = other RNA
gctcagccaggtagtactgtgtttaagagctagaaatagcaagtttaaataaggctagtccgttatcagcgtgaaaacgcggcaccgagtcggtgcgcagccccttcgagtacccacagtactacctggattcaacgaaggggttttttt

SEQ ID NO: 207 - RNA, 150 nt, synthetic construct
  source 1..150: mol_type = other RNA
gctcagccaggtagtactgtgtttaagagctagaaatagcaagtttaaataaggctagtccgttatcagcgtgaaaacgcggcaccgagtcggtgcgcagccccttcgagtacccacagtactacctggaaattgtcgaagggttttttt

SEQ ID NO: 208 - RNA, 150 nt, synthetic construct
  source 1..150: mol_type = other RNA
gctcagccaggtagtactgtgtttaagagctagaaatagcaagtttaaataaggctagtccgttatcagcgtgaaaacgcggcaccgagtcggtgcgcagccccttcgagtacccacagtactacctggatcccactcgaaggttttttt

SEQ ID NO: 209 - RNA, 150 nt, synthetic construct
  source 1..150: mol_type = other RNA
gctcagccaggtagtactgtgtttaagagctagaaatagcaagtttaaataaggctagtccgttatcagcgtgaaaacgcggcaccgagtcggtgcgcagccccttcgagtacccacagtactacctggatccccactcgaagttttttt

SEQ ID NO: 210 - RNA, 150 nt, synthetic construct
  source 1..150: mol_type = other RNA
gctcagccaggtagtactgtgtttaagagctagaaatagcaagtttaaataaggctagtccgttatcagcgtgaaaacgcggcaccgagtcggtgcgcagccccttcgagtacccacagtactacctggacctcctactcgaattttttt

SEQ ID NO: 211 - RNA, 150 nt, synthetic construct
  source 1..150: mol_type = other RNA
gctcagccaggtagtactgtgtttaagagctagaaatagcaagtttaaataaggctagtccgttatcagcgtgaaaacgcggcaccgagtcggtgcgcagccccttcgagtacccacagtactacctggatagacgtactcgattttttt

SEQ ID NO: 212 - RNA, 150 nt, synthetic construct
  source 1..150: mol_type = other RNA
gctcagccaggtagtactgtgtttaagagctagaaatagcaagtttaaataaggctagtccgttatcagcgtgaaaacgcggcaccgagtcggtgcgcagccccttcgagtacccacagtactacctggaagttcggtactcgttttttt

SEQ ID NO: 213 - RNA, 150 nt, synthetic construct
  source 1..150: mol_type = other RNA
gctcagccaggtagtactgtgtttaagagctagaaatagcaagtttaaataaggctagtccgttatcagcgtgaaaacgcggcaccgagtcggtgcgcagccccttcgagtacccacagtactacctggagaaacgggtactcttttttt

SEQ ID NO: 214 - RNA, 150 nt, synthetic construct
  source 1..150: mol_type = other RNA
gctcagccaggtagtactgtgtttaagagctagaaatagcaagtttaaataaggctagtccgttatcagcgtgaaaacgcggcaccgagtcggtgcgcagccccttcgagtacccacagtactacctggaaagaatgggtactttttttt

SEQ ID NO: 215 - RNA, 150 nt, synthetic construct
  source 1..150: mol_type = other RNA
gctcagccaggtagtactgtgtttaagagctagaaatagcaagtttaaataaggctagtccgttatcagcgtgaaaacgcggcaccgagtcggtgcgcagccccttcgagtacccacagtactacctggaaataagtgggtacttttttt

SEQ ID NO: 216 - RNA, 150 nt, synthetic construct
  source 1..150: mol_type = other RNA
gctcagccaggtagtactgtgtttaagagctagaaatagcaagtttaaataaggctagtccgttatcagcgtgaaaacgcggcaccgagtcggtgcgcagccccttcgagtacccacagtactacctggaaaaaatgtgggtattttttt

SEQ ID NO: 217 - RNA, 150 nt, synthetic construct
  source 1..150: mol_type = other RNA
gctcagccaggtagtactgtgtttaagagctagaaatagcaagtttaaataaggctagtccgttatcagcgtgaaaacgcggcaccgagtcggtgcagccccttcgagtatccacagtactacctggcttcatagaaggggctttttttt

SEQ ID NO: 218 - RNA, 150 nt, synthetic construct
  source 1..150: mol_type = other RNA
gctcagccaggtagtactgtgtttaagagctagaaatagcaagtttaaataaggctagtccgttatcagcgtgaaaacgcggcaccgagtcggtgcagccccttcgagtatccacagtactacctggcttcaagtgaaggggcttttttt

SEQ ID NO: 219 - RNA, 150 nt, synthetic construct
  source 1..150: mol_type = other RNA
gctcagccaggtagtactgtgtttaagagctagaaatagcaagtttaaataaggctagtccgttatcagcgtgaaaacgcggcaccgagtcggtgcagccccttcgagtatccacagtactacctggctttctatcgaaggggttttttt

SEQ ID NO: 220 - RNA, 150 nt, synthetic construct
  source 1..150: mol_type = other RNA
gctcagccaggtagtactgtgtttaagagctagaaatagcaagtttaaataaggctagtccgttatcagcgtgaaaacgcggcaccgagtcggtgcagccccttcgagtatccacagtactacctggctaaaatttcgaagggttttttt

SEQ ID NO: 221 - RNA, 150 nt, synthetic construct
  source 1..150: mol_type = other RNA
gctcagccaggtagtactgtgtttaagagctagaaatagcaagtttaaataaggctagtccgttatcagcgtgaaaacgcggcaccgagtcggtgcagccccttcgagtatccacagtactacctggctactactctcgaaggttttttt

SEQ ID NO: 222 - RNA, 150 nt, synthetic construct
  source 1..150: mol_type = other RNA
gctcagccaggtagtactgtgtttaagagctagaaatagcaagtttaaataaggctagtccgttatcagcgtgaaaacgcggcaccgagtcggtgcagccccttcgagtatccacagtactacctggctactataactcgaagttttttt

SEQ ID NO: 223 - RNA, 150 nt, synthetic construct
  source 1..150: mol_type = other RNA
gctcagccaggtagtactgtgtttaagagctagaaatagcaagtttaaataaggctagtccgttatcagcgtgaaaacgcggcaccgagtcggtgcagccccttcgagtatccacagtactacctggctacactgtactcgaattttttt

SEQ ID NO: 224 - RNA, 150 nt, synthetic construct
  source 1..150: mol_type = other RNA
gctcagccaggtagtactgtgtttaagagctagaaatagcaagtttaaataaggctagtccgttatcagcgtgaaaacgcggcaccgagtcggtgcagccccttcgagtatccacagtactacctggctatactcatactcgattttttt

SEQ ID NO: 225 - RNA, 150 nt, synthetic construct
  source 1..150: mol_type = other RNA
gctcagccaggtagtactgtgtttaagagctagaaatagcaagtttaaataaggctagtccgttatcagcgtgaaaacgcggcaccgagtcggtgcagccccttcgagtatccacagtactacctggcttctccagatactcgttttttt

SEQ ID NO: 226 - RNA, 150 nt, synthetic construct
  source 1..150: mol_type = other RNA
gctcagccaggtagtactgtgtttaagagctagaaatagcaagtttaaataaggctagtccgttatcagcgtgaaaacgcggcaccgagtcggtgcagccccttcgagtatccacagtactacctggctaatattggatactcttttttt

SEQ ID NO: 227 - RNA, 150 nt, synthetic construct
  source 1..150: mol_type = other RNA
gctcagccaggtagtactgtgtttaagagctagaaatagcaagtttaaataaggctagtccgttatcagcgtgaaaacgcggcaccgagtcggtgcagccccttcgagtatccacagtactacctggctcacccctggatactttttttt

SEQ ID NO: 228 - RNA, 150 nt, synthetic construct
  source 1..150: mol_type = other RNA
gctcagccaggtagtactgtgtttaagagctagaaatagcaagtttaaataaggctagtccgttatcagcgtgaaaacgcggcaccgagtcggtgcagccccttcgagtatccacagtactacctggctttctatgtggatacttttttt

SEQ ID NO: 229 - RNA, 150 nt, synthetic construct
  source 1..150: mol_type = other RNA
gctcagccaggtagtactgtgtttaagagctagaaatagcaagtttaaataaggctagtccgttatcagcgtgaaaacgcggcaccgagtcggtgcagccccttcgagtatccacagtactacctggctcaaatctgtggatattttttt

SEQ ID NO: 230 - RNA, 150 nt, synthetic construct
  source 1..150: mol_type = other RNA
gctcagccaggtagtactgtgtttaagagctagaaatagcaagtttaaataaggctagtccgttatcagcgtgaaaacgcggcaccgagtcggtgcagccccttcgagtatccacagtactacctggctgaaaaataggggctttttttt

SEQ ID NO: 231 - RNA, 150 nt, synthetic construct
  source 1..150: mol_type = other RNA
gctcagccaggtagtactgtgtttaagagctagaaatagcaagtttaaataaggctagtccgttatcagcgtgaaaacgcggcaccgagtcggtgcagccccttcgagtatccacagtactacctggctgaaataacaggggcttttttt

SEQ ID NO: 232 - RNA, 150 nt, synthetic construct
  source 1..150: mol_type = other RNA
gctcagccaggtagtactgtgtttaagagctagaaatagcaagtttaaataaggctagtccgttatcagcgtgaaaacgcggcaccgagtcggtgcagccccttcgagtatccacagtactacctggctgaattaacaaggggttttttt

SEQ ID NO: 233 - RNA, 150 nt, synthetic construct
  source 1..150: mol_type = other RNA
gctcagccaggtagtactgtgtttaagagctagaaatagcaagtttaaataaggctagtccgttatcagcgtgaaaacgcggcaccgagtcggtgcagccccttcgagtatccacagtactacctggctgactgttagaagggttttttt

SEQ ID NO: 234 - RNA, 150 nt, synthetic construct
  source 1..150: mol_type = other RNA
gctcagccaggtagtactgtgtttaagagctagaaatagcaagtttaaataaggctagtccgttatcagcgtgaaaacgcggcaccgagtcggtgcagccccttcgagtatccacagtactacctggctgacaaaatcgaaggttttttt

SEQ ID NO: 235 - RNA, 150 nt, synthetic construct
  source 1..150: mol_type = other RNA
gctcagccaggtagtactgtgtttaagagctagaaatagcaagtttaaataaggctagtccgttatcagcgtgaaaacgcggcaccgagtcggtgcagccccttcgagtatccacagtactacctggctgacccccctcgaagttttttt

SEQ ID NO: 236 - RNA, 150 nt, synthetic construct
  source 1..150: mol_type = other RNA
gctcagccaggtagtactgtgtttaagagctagaaatagcaagtttaaataaggctagtccgttatcagcgtgaaaacgcggcaccgagtcggtgcagccccttcgagtatccacagtactacctggctgaaaccgactcgaattttttt

SEQ ID NO: 237 - RNA, 150 nt, synthetic construct
  source 1..150: mol_type = other RNA
gctcagccaggtagtactgtgtttaagagctagaaatagcaagtttaaataaggctagtccgttatcagcgtgaaaacgcggcaccgagtcggtgcagccccttcgagtatccacagtactacctggctgaaccccgactcgattttttt

SEQ ID NO: 238 - RNA, 150 nt, synthetic construct
  source 1..150: mol_type = other RNA
gctcagccaggtagtactgtgtttaagagctagaaatagcaagtttaaataaggctagtccgttatcagcgtgaaaacgcggcaccgagtcggtgcagccccttcgagtatccacagtactacctggctgacaaaagtactcgttttttt

SEQ ID NO: 239 - RNA, 150 nt, synthetic construct
  source 1..150: mol_type = other RNA
gctcagccaggtagtactgtgtttaagagctagaaatagcaagtttaaataaggctagtccgttatcagcgtgaaaacgcggcaccgagtcggtgcagccccttcgagtatccacagtactacctggctgaaaaacgatactcttttttt

SEQ ID NO: 240 - RNA, 150 nt, synthetic construct
  source 1..150: mol_type = other RNA
gctcagccaggtagtactgtgtttaagagctagaaatagcaagtttaaataaggctagtccgttatcagcgtgaaaacgcggcaccgagtcggtgcagccccttcgagtatccacagtactacctggctgaaaccctgatactttttttt

SEQ ID NO: 241 - RNA, 150 nt, synthetic construct
  source 1..150: mol_type = other RNA
gctcagccaggtagtactgtgtttaagagctagaaatagcaagtttaaataaggctagtccgttatcagcgtgaaaacgcggcaccgagtcggtgcagccccttcgagtatccacagtactacctggctgaaaaaatggatacttttttt

SEQ ID NO: 242 - RNA, 150 nt, synthetic construct
  source 1..150: mol_type = other RNA
gctcagccaggtagtactgtgtttaagagctagaaatagcaagtttaaataaggctagtccgttatcagcgtgaaaacgcggcaccgagtcggtgcagccccttcgagtatccacagtactacctggctgaaaaaaatggatattttttt

SEQ ID NO: 243 - RNA, 150 nt, synthetic construct
  source 1..150: mol_type = other RNA
gctcagccaggtagtactgtgtttaagagctagaaatagcaagtttaaataaggctagtccgttatcagcgtgaaaacgcggcaccgagtcggtgcagccccttcgagtatccacagtactacctggctgaataaaagtggatttttttt

SEQ ID NO: 244 - RNA, 150 nt, synthetic construct
  source 1..150: mol_type = other RNA
gctcagccaggtagtactgtgtttaagagctagaaatagcaagtttaaataaggctagtccgttatcagcgtgaaaacgcggcaccgagtcggtgcagccccttcgagtatccacagtactacctggctgaatcatctgtggattttttt

SEQ ID NO: 245 - RNA, 152 nt, synthetic construct
  source 1..152: mol_type = other RNA
gctcagccaggtagtactgtgtttaagagctagaaatagcaagtttaaataaggctagtccgttatcagcgtgaaaacgcggcaccgagtcggtgcagccccttcgagtatccacagtactacctggctgaattaacaaggggctttttttt

SEQ ID NO: 246 - RNA, 152 nt, synthetic construct
  source 1..152: mol_type = other RNA
gctcagccaggtagtactgtgtttaagagctagaaatagcaagtttaaataaggctagtccgttatcagcgtgaaaacgcggcaccgagtcggtgcagccccttcgagtatccacagtactacctggctgactgttagaaggggcttttttt

SEQ ID NO: 247 - RNA, 152 nt, synthetic construct
  source 1..152: mol_type = other RNA
gctcagccaggtagtactgtgtttaagagctagaaatagcaagtttaaataaggctagtccgttatcagcgtgaaaacgcggcaccgagtcggtgcagccccttcgagtatccacagtactacctggctgaatctatcgaaggggttttttt

SEQ ID NO: 248 - RNA, 152 nt, synthetic construct
  source 1..152: mol_type = other RNA
gctcagccaggtagtactgtgtttaagagctagaaatagcaagtttaaataaggctagtccgttatcagcgtgaaaacgcggcaccgagtcggtgcagccccttcgagtatccacagtactacctggctgaacactttcgaagggttttttt

SEQ ID NO: 249 - RNA, 152 nt, synthetic construct
  source 1..152: mol_type = other RNA
gctcagccaggtagtactgtgtttaagagctagaaatagcaagtttaaataaggctagtccgttatcagcgtgaaaacgcggcaccgagtcggtgcagccccttcgagtatccacagtactacctggctgaactcggctcgaaggttttttt

SEQ ID NO: 250 - RNA, 152 nt, synthetic construct
  source 1..152: mol_type = other RNA
gctcagccaggtagtactgtgtttaagagctagaaatagcaagtttaaataaggctagtccgttatcagcgtgaaaacgcggcaccgagtcggtgcagccccttcgagtatccacagtactacctggctgaaccccgactcgaagttttttt

SEQ ID NO: 251 - RNA, 152 nt, synthetic construct
  source 1..152: mol_type = other RNA
gctcagccaggtagtactgtgtttaagagctagaaatagcaagtttaaataaggctagtccgttatcagcgtgaaaacgcggcaccgagtcggtgcagccccttcgagtatccacagtactacctggctgacccaagtactcgaattttttt

SEQ ID NO: 252 - RNA, 152 nt, synthetic construct
  source 1..152: mol_type = other RNA
gctcagccaggtagtactgtgtttaagagctagaaatagcaagtttaaataaggctagtccgttatcagcgtgaaaacgcggcaccgagtcggtgcagccccttcgagtatccacagtactacctggctgaaaaaagatactcgattttttt

SEQ ID NO: 253 - RNA, 152 nt, synthetic construct
  source 1..152: mol_type = other RNA
gctcagccaggtagtactgtgtttaagagctagaaatagcaagtttaaataaggctagtccgttatcagcgtgaaaacgcggcaccgagtcggtgcagccccttcgagtatccacagtactacctggctgaaaaaaagatactcgttttttt

SEQ ID NO: 254 - RNA, 152 nt, synthetic construct
  source 1..152: mol_type = other RNA
gctcagccaggtagtactgtgtttaagagctagaaatagcaagtttaaataaggctagtccgttatcagcgtgaaaacgcggcaccgagtcggtgcagccccttcgagtatccacagtactacctggctgaaaaaatggatactcttttttt

SEQ ID NO: 255 - RNA, 152 nt, synthetic construct
  source 1..152: mol_type = other RNA
gctcagccaggtagtactgtgtttaagagctagaaatagcaagtttaaataaggctagtccgttatcagcgtgaaaacgcggcaccgagtcggtgcagccccttcgagtatccacagtactacctggctgaaaaaaatggatactttttttt

SEQ ID NO: 256 - RNA, 152 nt, synthetic construct
  source 1..152: mol_type = other RNA
gctcagccaggtagtactgtgtttaagagctagaaatagcaagtttaaataaggctagtccgttatcagcgtgaaaacgcggcaccgagtcggtgcagccccttcgagtatccacagtactacctggctgaaaataagtggatacttttttt

SEQ ID NO: 257 - RNA, 152 nt, synthetic construct
  source 1..152: mol_type = other RNA
gctcagccaggtagtactgtgtttaagagctagaaatagcaagtttaaataaggctagtccgttatcagcgtgaaaacgcggcaccgagtcggtgcagccccttcgagtatccacagtactacctggctgaatcatttgtggatattttttt

SEQ ID NO: 258 - RNA, 152 nt, synthetic construct
  source 1..152: mol_type = other RNA
gctcagccaggtagtactgtgtttaagagctagaaatagcaagtttaaataaggctagtccgttatcagcgtgaaaacgcggcaccgagtcggtgcgcagccccttcgagtatccacagtactacctggctgacaacacggctgcttttttt

SEQ ID NO: 259 - RNA, 152 nt, synthetic construct
  source 1..152: mol_type = other RNA
gctcagccaggtagtactgtgtttaagagctagaaatagcaagtttaaataaggctagtccgttatcagcgtgaaaacgcggcaccgagtcggtgcgcagccccttcgagtatccacagtactacctggctgaacacccgggctgttttttt

SEQ ID NO: 260 - RNA, 152 nt, synthetic construct
  source 1..152: mol_type = other RNA
gctcagccaggtagtactgtgtttaagagctagaaatagcaagtttaaataaggctagtccgttatcagcgtgaaaacgcggcaccgagtcggtgcgcagccccttcgagtatccacagtactacctggctgaaaaataggggctttttttt

SEQ ID NO: 261 - RNA, 152 nt, synthetic construct
  source 1..152: mol_type = other RNA
gctcagccaggtagtactgtgtttaagagctagaaatagcaagtttaaataaggctagtccgttatcagcgtgaaaacgcggcaccgagtcggtgcgcagccccttcgagtatccacagtactacctggctgaaataacaggggcttttttt

SEQ ID NO: 262 - RNA, 152 nt, synthetic construct
  source 1..152: mol_type = other RNA
gctcagccaggtagtactgtgtttaagagctagaaatagcaagtttaaataaggctagtccgttatcagcgtgaaaacgcggcaccgagtcggtgcgcagccccttcgagtatccacagtactacctggctgaattaacaaggggttttttt

SEQ ID NO: 263 - RNA, 152 nt, synthetic construct
  source 1..152: mol_type = other RNA
gctcagccaggtagtactgtgtttaagagctagaaatagcaagtttaaataaggctagtccgttatcagcgtgaaaacgcggcaccgagtcggtgcgcagccccttcgagtatccacagtactacctggctgactgttagaagggttttttt

SEQ ID NO: 264 - RNA, 152 nt, synthetic construct
  source 1..152: mol_type = other RNA
gctcagccaggtagtactgtgtttaagagctagaaatagcaagtttaaataaggctagtccgttatcagcgtgaaaacgcggcaccgagtcggtgcgcagccccttcgagtatccacagtactacctggctgacaaaatcgaaggttttttt

SEQ ID NO: 265 - RNA, 152 nt, synthetic construct
  source 1..152: mol_type = other RNA
gctcagccaggtagtactgtgtttaagagctagaaatagcaagtttaaataaggctagtccgttatcagcgtgaaaacgcggcaccgagtcggtgcgcagccccttcgagtatccacagtactacctggctgacccccctcgaagttttttt

SEQ ID NO: 266 - RNA, 152 nt, synthetic construct
  source 1..152: mol_type = other RNA
gctcagccaggtagtactgtgtttaagagctagaaatagcaagtttaaataaggctagtccgttatcagcgtgaaaacgcggcaccgagtcggtgcgcagccccttcgagtatccacagtactacctggctgaacccggctcgaattttttt

SEQ ID NO: 267 - RNA, 152 nt, synthetic construct
  source 1..152: mol_type = other RNA
gctcagccaggtagtactgtgtttaagagctagaaatagcaagtttaaataaggctagtccgttatcagcgtgaaaacgcggcaccgagtcggtgcgcagccccttcgagtatccacagtactacctggctgaactacaactcgattttttt

SEQ ID NO: 268 - RNA, 152 nt, synthetic construct
  source 1..152: mol_type = other RNA
gctcagccaggtagtactgtgtttaagagctagaaatagcaagtttaaataaggctagtccgttatcagcgtgaaaacgcggcaccgagtcggtgcgcagccccttcgagtatccacagtactacctggctgaattatctactcgttttttt

SEQ ID NO: 269 - RNA, 152 nt, synthetic construct
  source 1..152: mol_type = other RNA
gctcagccaggtagtactgtgtttaagagctagaaatagcaagtttaaataaggctagtccgttatcagcgtgaaaacgcggcaccgagtcggtgcgcagccccttcgagtatccacagtactacctggctgaaacccgatactcttttttt

SEQ ID NO: 270 - RNA, 152 nt, synthetic construct
  source 1..152: mol_type = other RNA
gctcagccaggtagtactgtgtttaagagctagaaatagcaagtttaaataaggctagtccgttatcagcgtgaaaacgcggcaccgagtcggtgcgcagccccttcgagtatccacagtactacctggctgaaaccctgatactttttttt

SEQ ID NO: 271 - RNA, 152 nt, synthetic construct
  source 1..152: mol_type = other RNA
gctcagccaggtagtactgtgtttaagagctagaaatagcaagtttaaataaggctagtccgttatcagcgtgaaaacgcggcaccgagtcggtgcgcagccccttcgagtatccacagtactacctggctgaataaatggatacttttttt

SEQ ID NO: 272 - RNA, 152 nt, synthetic construct
  source 1..152: mol_type = other RNA
gctcagccaggtagtactgtgtttaagagctagaaatagcaagtttaaataaggctagtccgttatcagcgtgaaaacgcggcaccgagtcggtgcgcagccccttcgagtatccacagtactacctggctgaatgacatggatattttttt

SEQ ID NO: 273 - RNA, 152 nt, synthetic construct
  source 1..152: mol_type = other RNA
gctcagccaggtagtactgtgtttaagagctagaaatagcaagtttaaataaggctagtccgttatcagcgtgaaaacgcggcaccgagtcggtgcgcagccccttcgagtatccacagtactacctggctgattataagtggatttttttt

SEQ ID NO: 274 - RNA, 152 nt, synthetic construct
  source 1..152: mol_type = other RNA
gctcagccaggtagtactgtgtttaagagctagaaatagcaagtttaaataaggctagtccgttatcagcgtgaaaacgcggcaccgagtcggtgcgcagccccttcgagtatccacagtactacctggctgaataatatgtggattttttt

SEQ ID NO: 275 - RNA, 154 nt, synthetic construct
  source 1..154: mol_type = other RNA
gctcagccaggtagtactgtgttttagagctagaaatagcaagttaaaataaggctagtccgttatcaacttgaaaaagtggcaccgagtcggtgcagccccttcgagtacccacagtactaccaacattgacgcgtctctacgtgggggcgcg

SEQ ID NO: 276 - RNA, 154 nt, synthetic construct
  source 1..154: mol_type = other RNA
gctcagccaggtagtactgtgtttaagagctagaaatagcaagtttaaataaggctagtccgttatcagcgtgaaaacgcggcaccgagtcggtgcgcagccccttcgagtatccacagtactacctggctgaaaaataggggctgcttttttt

SEQ ID NO: 277 - RNA, 154 nt, synthetic construct
  source 1..154: mol_type = other RNA
gctcagccaggtagtactgtgtttaagagctagaaatagcaagtttaaataaggctagtccgttatcagcgtgaaaacgcggcaccgagtcggtgcgcagccccttcgagtatccacagtactacctggctgaaaaattaggggctgttttttt

SEQ ID NO: 278 - RNA, 154 nt, synthetic construct
  source 1..154: mol_type = other RNA
gctcagccaggtagtactgtgtttaagagctagaaatagcaagtttaaataaggctagtccgttatcagcgtgaaaacgcggcaccgagtcggtgcgcagccccttcgagtatccacagtactacctggctgaattaacaaggggctttttttt

SEQ ID NO: 279 - RNA, 154 nt, synthetic construct
  source 1..154: mol_type = other RNA
gctcagccaggtagtactgtgtttaagagctagaaatagcaagtttaaataaggctagtccgttatcagcgtgaaaacgcggcaccgagtcggtgcgcagccccttcgagtatccacagtactacctggctgactgttagaaggggcttttttt

SEQ ID NO: 280 - RNA, 154 nt, synthetic construct
  source 1..154: mol_type = other RNA
gctcagccaggtagtactgtgtttaagagctagaaatagcaagtttaaataaggctagtccgttatcagcgtgaaaacgcggcaccgagtcggtgcgcagccccttcgagtatccacagtactacctggctgaatctatcgaaggggttttttt

SEQ ID NO: 281 - RNA, 154 nt, synthetic construct
  source 1..154: mol_type = other RNA
gctcagccaggtagtactgtgtttaagagctagaaatagcaagtttaaataaggctagtccgttatcagcgtgaaaacgcggcaccgagtcggtgcgcagccccttcgagtatccacagtactacctggctgaacactttcgaagggttttttt

SEQ ID NO: 282 - RNA, 154 nt, synthetic construct
  source 1..154: mol_type = other RNA
gctcagccaggtagtactgtgtttaagagctagaaatagcaagtttaaataaggctagtccgttatcagcgtgaaaacgcggcaccgagtcggtgcgcagccccttcgagtatccacagtactacctggctgaactcggctcgaaggttttttt

SEQ ID NO: 283 - RNA, 154 nt, synthetic construct
  source 1..154: mol_type = other RNA
gctcagccaggtagtactgtgtttaagagctagaaatagcaagtttaaataaggctagtccgttatcagcgtgaaaacgcggcaccgagtcggtgcgcagccccttcgagtatccacagtactacctggctgaaccccgactcgaagttttttt

SEQ ID NO: 284 - RNA, 154 nt, synthetic construct
  source 1..154: mol_type = other RNA
gctcagccaggtagtactgtgtttaagagctagaaatagcaagtttaaataaggctagtccgttatcagcgtgaaaacgcggcaccgagtcggtgcgcagccccttcgagtatccacagtactacctggctgacccaagtactcgaattttttt

SEQ ID NO: 285 - RNA, 154 nt, synthetic construct
  source 1..154: mol_type = other RNA
gctcagccaggtagtactgtgtttaagagctagaaatagcaagtttaaataaggctagtccgttatcagcgtgaaaacgcggcaccgagtcggtgcgcagccccttcgagtatccacagtactacctggctgaaaaaagatactcgattttttt

SEQ ID NO: 286 - RNA, 154 nt, synthetic construct
  source 1..154: mol_type = other RNA
gctcagccaggtagtactgtgtttaagagctagaaatagcaagtttaaataaggctagtccgttatcagcgtgaaaacgcggcaccgagtcggtgcgcagccccttcgagtatccacagtactacctggctgaaacccggatactcgttttttt

SEQ ID NO: 287 - RNA, 154 nt, synthetic construct
  source 1..154: mol_type = other RNA
gctcagccaggtagtactgtgtttaagagctagaaatagcaagtttaaataaggctagtccgttatcagcgtgaaaacgcggcaccgagtcggtgcgcagccccttcgagtatccacagtactacctggctgaaaaaatggatactcttttttt

SEQ ID NO: 288 - RNA, 154 nt, synthetic construct
  source 1..154: mol_type = other RNA
gctcagccaggtagtactgtgtttaagagctagaaatagcaagtttaaataaggctagtccgttatcagcgtgaaaacgcggcaccgagtcggtgcgcagccccttcgagtatccacagtactacctggctgaaataattggatactttttttt

SEQ ID NO: 289 - RNA, 154 nt, synthetic construct
  source 1..154: mol_type = other RNA
gctcagccaggtagtactgtgtttaagagctagaaatagcaagtttaaataaggctagtccgttatcagcgtgaaaacgcggcaccgagtcggtgcgcagccccttcgagtatccacagtactacctggctgaaaataagtggatacttttttt

SEQ ID NO: 290 - RNA, 154 nt, synthetic construct
  source 1..154: mol_type = other RNA
gctcagccaggtagtactgtgtttaagagctagaaatagcaagtttaaataaggctagtccgttatcagcgtgaaaacgcggcaccgagtcggtgcgcagccccttcgagtatccacagtactacctggctgaaaaaaatgtggatattttttt

SEQ ID NO: 291 - RNA, 156 nt, synthetic construct
  source 1..156: mol_type = other RNA
gctcagccaggtagtactgtgttttagagctagaaatagcaagttaaaataaggctagtccgttatcaacttgaaaaagtggcaccgagtcggtgcagccccttcgagtacccacagtactacctgaacattgacgcgtctctacgtgggggcgcg

SEQ ID NO: 292 - RNA, 156 nt, synthetic construct
  source 1..156: mol_type = other RNA
gctcagccaggtagtactgtgttttagagctagaaatagcaagttaaaataaggctagtccgttatcaacttgaaaaagtggcaccgagtcggtgcgcagccccttcgagtacccacagtactaccaacattgacgcgtctctacgtgggggcgcg

SEQ ID NO: 293 - RNA, 157 nt, synthetic construct
  source 1..157: mol_type = other RNA
gctcagccaggtagtactgtgttttagagctagaaatagcaagttaaaataaggctagtccgttatcaacttgaaaaagtggcaccgagtcggtgcagccccttcgagtacccacagtactacctggaacattgacgcgtctctacgtgggggcgcg

SEQ ID NO: 294 - RNA, 157 nt, synthetic construct
  source 1..157: mol_type = other RNA
gctcagccaggtagtactgtgttttagagctagaaatagcaagttaaaataaggctagtccgttatcaacttgaaaaagtggcaccgagtcggtgcgcagccccttcgagtacccacagtactacctaacattgacgcgtctctacgtgggggcgcg

SEQ ID NO: 295 - RNA, 157 nt, synthetic construct
  source 1..157: mol_type = other RNA
gctcagccaggtagtactgtgttttagagctagaaatagcaagttaaaataaggctagtccgttatcaacttgaaaaagtggcaccgagtcggtgcagccccttcgagtatccacagtactacctggaacattgacgcgtctctacgtgggggcgcg

SEQ ID NO: 296 - RNA, 157 nt, synthetic construct
  source 1..157: mol_type = other RNA
gctcagccaggtagtactgtgttttagagctagaaatagcaagttaaaataaggctagtccgttatcaacttgaaaaagtggcaccgagtcggtgcgcagccccttcgagtatccacagtactacctaacattgacgcgtctctacgtgggggcgcg

SEQ ID NO: 297 - RNA, 158 nt, synthetic construct
  source 1..158: mol_type = other RNA
gctcagccaggtagtactgtgttttagagctagaaatagcaagttaaaataaggctagtccgttatcaacttgaaaaagtggcaccgagtcggtgcagccccttcgagtacccacagtactacctggcaacattgacgcgtctctacgtgggggcgcg

SEQ ID NO: 298 - RNA, 158 nt, synthetic construct
  source 1..158: mol_type = other RNA
gctcagccaggtagtactgtgttttagagctagaaatagcaagttaaaataaggctagtccgttatcaacttgaaaaagtggcaccgagtcggtgcgcagccccttcgagtacccacagtactacctgaacattgacgcgtctctacgtgggggcgcg

SEQ ID NO: 299 - RNA, 158 nt, synthetic construct
  source 1..158: mol_type = other RNA
gctcagccaggtagtactgtgttttagagctagaaatagcaagttaaaataaggctagtccgttatcaacttgaaaaagtggcaccgagtcggtgcacgcagccccttcgagtacccacagtactaccaacattgacgcgtctctacgtgggggcgcg

SEQ ID NO: 300 - RNA, 158 nt, synthetic construct
  source 1..158: mol_type = other RNA
gctcagccaggtagtactgtgttttagagctagaaatagcaagttaaaataaggctagtccgttatcaacttgaaaaagtggcaccgagtcggtgcagccccttcgagtatccacagtactacctggcaacattgacgcgtctctacgtgggggcgcg

SEQ ID NO: 301 - RNA, 158 nt, synthetic construct
  source 1..158: mol_type = other RNA
gctcagccaggtagtactgtgttttagagctagaaatagcaagttaaaataaggctagtccgttatcaacttgaaaaagtggcaccgagtcggtgcgcagccccttcgagtatccacagtactacctgaacattgacgcgtctctacgtgggggcgcg

SEQ ID NO: 302 - RNA, 159 nt, synthetic construct
  source 1..159: mol_type = other RNA
gctcagccaggtagtactgtgttttagagctagaaatagcaagttaaaataaggctagtccgttatcaacttgaaaaagtggcaccgagtcggtgcagccccttcgagtacccacagtactacctggctaacattgacgcgtctctacgtgggggcgcg

SEQ ID NO: 303 - RNA, 159 nt, synthetic construct
  source 1..159: mol_type = other RNA
gctcagccaggtagtactgtgttttagagctagaaatagcaagttaaaataaggctagtccgttatcaacttgaaaaagtggcaccgagtcggtgcgcagccccttcgagtacccacagtactacctggaacattgacgcgtctctacgtgggggcgcg

SEQ ID NO: 304 - RNA, 159 nt, synthetic construct
  source 1..159: mol_type = other RNA
gctcagccaggtagtactgtgttttagagctagaaatagcaagttaaaataaggctagtccgttatcaacttgaaaaagtggcaccgagtcggtgcagccccttcgagtatccacagtactacctggctaacattgacgcgtctctacgtgggggcgcg

SEQ ID NO: 305 - RNA, 159 nt, synthetic construct
  source 1..159: mol_type = other RNA
gctcagccaggtagtactgtgttttagagctagaaatagcaagttaaaataaggctagtccgttatcaacttgaaaaagtggcaccgagtcggtgcgcagccccttcgagtatccacagtactacctggaacattgacgcgtctctacgtgggggcgcg

SEQ ID NO: 306 - RNA, 160 nt, synthetic construct
  source 1..160: mol_type = other RNA
gctcagccaggtagtactgtgttttagagctagaaatagcaagttaaaataaggctagtccgttatcaacttgaaaaagtggcaccgagtcggtgcagccccttcgagtacccacagtactacctggctgaacattgacgcgtctctacgtgggggcgcg

SEQ ID NO: 307 - RNA, 160 nt, synthetic construct
  source 1..160: mol_type = other RNA
gctcagccaggtagtactgtgttttagagctagaaatagcaagttaaaataaggctagtccgttatcaacttgaaaaagtggcaccgagtcggtgcgcagccccttcgagtacccacagtactacctggcaacattgacgcgtctctacgtgggggcgcg

SEQ ID NO: 308 - RNA, 160 nt, synthetic construct
  source 1..160: mol_type = other RNA
gctcagccaggtagtactgtgttttagagctagaaatagcaagttaaaataaggctagtccgttatcaacttgaaaaagtggcaccgagtcggtgcacgcagccccttcgagtacccacagtactacctgaacattgacgcgtctctacgtgggggcgcg

SEQ ID NO: 309 - RNA, 160 nt, synthetic construct
  source 1..160: mol_type = other RNA
gctcagccaggtagtactgtgttttagagctagaaatagcaagttaaaataaggctagtccgttatcaacttgaaaaagtggcaccgagtcggtgcgtacgcagccccttcgagtacccacagtactaccaacattgacgcgtctctacgtgggggcgcg

SEQ ID NO: 310 - RNA, 160 nt, synthetic construct
  source 1..160: mol_type = other RNA
gctcagccaggtagtactgtgttttagagctagaaatagcaagttaaaataaggctagtccgttatcaacttgaaaaagtggcaccgagtcggtgcagccccttcgagtatccacagtactacctggctgaacattgacgcgtctctacgtgggggcgcg

SEQ ID NO: 311 - RNA, 160 nt, synthetic construct
  source 1..160: mol_type = other RNA
gctcagccaggtagtactgtgttttagagctagaaatagcaagttaaaataaggctagtccgttatcaacttgaaaaagtggcaccgagtcggtgcgcagccccttcgagtatccacagtactacctggcaacattgacgcgtctctacgtgggggcgcg

SEQ ID NO: 312 - RNA, 161 nt, synthetic construct
  source 1..161: mol_type = other RNA
gctcagccaggtagtactgtgttttagagctagaaatagcaagttaaaataaggctagtccgttatcaacttgaaaaagtggcaccgagtcggtgcagccccttcgagtacccacagtactacctggctgaaacattgacgcgtctctacgtgggggcgcg

SEQ ID NO: 313 - RNA, 161 nt, synthetic construct
  source 1..161: mol_type = other RNA
gctcagccaggtagtactgtgttttagagctagaaatagcaagttaaaataaggctagtccgttatcaacttgaaaaagtggcaccgagtcggtgcgcagccccttcgagtacccacagtactacctggctaacattgacgcgtctctacgtgggggcgcg

SEQ ID NO: 314 - RNA, 161 nt, synthetic construct
  source 1..161: mol_type = other RNA
gctcagccaggtagtactgtgttttagagctagaaatagcaagttaaaataaggctagtccgttatcaacttgaaaaagtggcaccgagtcggtgcagccccttcgagtatccacagtactacctggctgaaacattgacgcgtctctacgtgggggcgcg

SEQ ID NO: 315 - RNA, 161 nt, synthetic construct
  source 1..161: mol_type = other RNA
gctcagccaggtagtactgtgttttagagctagaaatagcaagttaaaataaggctagtccgttatcaacttgaaaaagtggcaccgagtcggtgcgcagccccttcgagtatccacagtactacctggctaacattgacgcgtctctacgtgggggcgcg

SEQ ID NO: 316 - RNA, 162 nt, synthetic construct
  source 1..162: mol_type = other RNA
gctcagccaggtagtactgtgttttagagctagaaatagcaagttaaaataaggctagtccgttatcaacttgaaaaagtggcaccgagtcggtgcgcagccccttcgagtacccacagtactacctggctgaacattgacgcgtctctacgtgggggcgcg

SEQ ID NO: 317 - RNA, 162 nt, synthetic construct
  source 1..162: mol_type = other RNA
gctcagccaggtagtactgtgttttagagctagaaatagcaagttaaaataaggctagtccgttatcaacttgaaaaagtggcaccgagtcggtgcacgcagccccttcgagtacccacagtactacctggcaacattgacgcgtctctacgtgggggcgcg

SEQ ID NO: 318 - RNA, 162 nt, synthetic construct
  source 1..162: mol_type = other RNA
gctcagccaggtagtactgtgttttagagctagaaatagcaagttaaaataaggctagtccgttatcaacttgaaaaagtggcaccgagtcggtgcgtacgcagccccttcgagtacccacagtactacctgaacattgacgcgtctctacgtgggggcgcg

SEQ ID NO: 319 - RNA, 162 nt, synthetic construct
  source 1..162: mol_type = other RNA
gctcagccaggtagtactgtgttttagagctagaaatagcaagttaaaataaggctagtccgttatcaacttgaaaaagtggcaccgagtcggtgctggtacgcagccccttcgagtacccacagtactaccaacattgacgcgtctctacgtgggggcgcg

SEQ ID NO: 320 - RNA, 162 nt, synthetic construct
  source 1..162: mol_type = other RNA
gctcagccaggtagtactgtgttttagagctagaaatagcaagttaaaataaggctagtccgttatcaacttgaaaaagtggcaccgagtcggtgcagccccttcgagtacccacagtactacctggctgagaacattgacgcgtctctacgtgggggcgcg

SEQ ID NO: 321 - RNA, 162 nt, synthetic construct
  source 1..162: mol_type = other RNA
gctcagccaggtagtactgtgttttagagctagaaatagcaagttaaaataaggctagtccgttatcaacttgaaaaagtggcaccgagtcggtgcagccccttcgagtatccacagtactacctggctgagaacattgacgcgtctctacgtgggggcgcg

SEQ ID NO: 322 - RNA, 162 nt, synthetic construct
  source 1..162: mol_type = other RNA
gctcagccaggtagtactgtgttttagagctagaaatagcaagttaaaataaggctagtccgttatcaacttgaaaaagtggcaccgagtcggtgcgcagccccttcgagtatccacagtactacctggctgaacattgacgcgtctctacgtgggggcgcg

SEQ ID NO: 323 - RNA, 163 nt, synthetic construct
  source 1..163: mol_type = other RNA
gctcagccaggtagtactgtgttttagagctagaaatagcaagttaaaataaggctagtccgttatcaacttgaaaaagtggcaccgagtcggtgcgcagccccttcgagtacccacagtactacctggctgaaacattgacgcgtctctacgtgggggcgcg

SEQ ID NO: 324 - RNA, 163 nt, synthetic construct
  source 1..163: mol_type = other RNA
gctcagccaggtagtactgtgttttagagctagaaatagcaagttaaaataaggctagtccgttatcaacttgaaaaagtggcaccgagtcggtgcgcagccccttcgagtatccacagtactacctggctgaaacattgacgcgtctctacgtgggggcgcg

SEQ ID NO: 325 - RNA, 164 nt, synthetic construct
  source 1..164: mol_type = other RNA
gctcagccaggtagtactgtgttttagagctagaaatagcaagttaaaataaggctagtccgttatcaacttgaaaaagtggcaccgagtcggtgcacgcagccccttcgagtacccacagtactacctggctgaacattgacgcgtctctacgtgggggcgcg

SEQ ID NO: 326 - RNA, 164 nt, synthetic construct
  source 1..164: mol_type = other RNA
gctcagccaggtagtactgtgttttagagctagaaatagcaagttaaaataaggctagtccgttatcaacttgaaaaagtggcaccgagtcggtgcgtacgcagccccttcgagtacccacagtactacctggcaacattgacgcgtctctacgtgggggcgcg

SEQ ID NO: 327 - RNA, 164 nt, synthetic construct
  source 1..164: mol_type = other RNA
gctcagccaggtagtactgtgttttagagctagaaatagcaagttaaaataaggctagtccgttatcaacttgaaaaagtggcaccgagtcggtgctggtacgcagccccttcgagtacccacagtactacctgaacattgacgcgtctctacgtgggggcgcg

SEQ ID NO: 328 - RNA, 164 nt, synthetic construct
  source 1..164: mol_type = other RNA
gctcagccaggtagtactgtgttttagagctagaaatagcaagttaaaataaggctagtccgttatcaacttgaaaaagtggcaccgagtcggtgctgtggtacgcagccccttcgagtacccacagtactaccaacattgacgcgtctctacgtgggggcgcg

SEQ ID NO: 329 - RNA, 164 nt, synthetic construct
  source 1..164: mol_type = other RNA
gctcagccaggtagtactgtgttttagagctagaaatagcaagttaaaataaggctagtccgttatcaacttgaaaaagtggcaccgagtcggtgcgcagccccttcgagtacccacagtactacctggctgagaacattgacgcgtctctacgtgggggcgcg

SEQ ID NO: 330 - RNA, 164 nt, synthetic construct
  source 1..164: mol_type = other RNA
gctcagccaggtagtactgtgttttagagctagaaatagcaagttaaaataaggctagtccgttatcaacttgaaaaagtggcaccgagtcggtgcgcagccccttcgagtatccacagtactacctggctgagaacattgacgcgtctctacgtgggggcgcg

SEQ ID NO: 331 - RNA, 164 nt, synthetic construct
  source 1..164: mol_type = other RNA
gctcagccaggtagtactgtgttttagagctagaaatagcaagttaaaataaggctagtccgttatcaacttgaaaaagtggcaccgagtcggtgcgcagccccttcgagtacccacagtactacctggatctatcgggtctctacgtgggggcccgttttttt

SEQ ID NO: 332 - RNA, 164 nt, synthetic construct
  source 1..164: mol_type = other RNA
gctcagccaggtagtactgtgtttaagagctagaaatagcaagtttaaataaggctagtccgttatcaacttgaaaaagtggcaccgagtcggtgcgcagccccttcgagtacccacagtactacctggatctatcgggtctctacgtgggggcccgttttttt

SEQ ID NO: 333 - RNA, 164 nt, synthetic construct
  source 1..164: mol_type = other RNA
gctcagccaggtagtactgtgtttaagagctagaaatagcaagtttaaataaggctagtccgttatcagcgtgaaaacgcggcaccgagtcggtgcgcagccccttcgagtacccacagtactacctggatctatcgggtctctacgtgggggcccgttttttt

SEQ ID NO: 334 - RNA, 164 nt, synthetic construct
  source 1..164: mol_type = other RNA
gctcagccaggtagtactgtgttttagagctagaaatagcaagttaaaataaggctagtccgttatcaacttgaaaaagtggcaccgagtcggtgcgcagccccttcgagtacccacagtactacctggaattatcgggtctctacgtgggggcccgttttttt

SEQ ID NO: 335 - RNA, 164 nt, synthetic construct
  source 1..164: mol_type = other RNA
gctcagccaggtagtactgtgtttaagagctagaaatagcaagtttaaataaggctagtccgttatcaacttgaaaaagtggcaccgagtcggtgcgcagccccttcgagtacccacagtactacctggaattatcgggtctctacgtgggggcccgttttttt

SEQ ID NO: 336 - RNA, 164 nt, synthetic construct
  source 1..164: mol_type = other RNA
gctcagccaggtagtactgtgtttaagagctagaaatagcaagtttaaataaggctagtccgttatcagcgtgaaaacgcggcaccgagtcggtgcgcagccccttcgagtacccacagtactacctggaattatcgggtctctacgtgggggcccgttttttt

SEQ ID NO: 337 - RNA, 164 nt, synthetic construct
  source 1..164: mol_type = other RNA
gctcagccaggtagtactgtgttttagagctagaaatagcaagttaaaataaggctagtccgttatcaacttgaaaaagtggcaccgagtcggtgcgcagccccttcgagtacccacagtactacctggacattcgcggcaccgtccgcccaaacggttttttt

SEQ ID NO: 338 - RNA, 164 nt, synthetic construct
  source 1..164: mol_type = other RNA
gctcagccaggtagtactgtgtttaagagctagaaatagcaagtttaaataaggctagtccgttatcaacttgaaaaagtggcaccgagtcggtgcgcagccccttcgagtacccacagtactacctggacattcgcggcaccgtccgcccaaacggttttttt

SEQ ID NO: 339 - RNA, 164 nt, synthetic construct
  source 1..164: mol_type = other RNA
gctcagccaggtagtactgtgtttaagagctagaaatagcaagtttaaataaggctagtccgttatcagcgtgaaaacgcggcaccgagtcggtgcgcagccccttcgagtacccacagtactacctggacattcgcggcaccgtccgcccaaacggttttttt

SEQ ID NO: 340 - RNA, 164 nt, synthetic construct
  source 1..164: mol_type = other RNA
gctcagccaggtagtactgtgttttagagctagaaatagcaagttaaaataaggctagtccgttatcaacttgaaaaagtggcaccgagtcggtgcgcagccccttcgagtacccacagtactacctggagattcgcggcaccgtccgcccaaacggttttttt

SEQ ID NO: 341 - RNA, 164 nt, synthetic construct
  source 1..164: mol_type = other RNA
gctcagccaggtagtactgtgtttaagagctagaaatagcaagtttaaataaggctagtccgttatcaacttgaaaaagtggcaccgagtcggtgcgcagccccttcgagtacccacagtactacctggagattcgcggcaccgtccgcccaaacggttttttt

SEQ ID NO: 342 - RNA, 164 nt, synthetic construct
  source 1..164: mol_type = other RNA
gctcagccaggtagtactgtgtttaagagctagaaatagcaagtttaaataaggctagtccgttatcagcgtgaaaacgcggcaccgagtcggtgcgcagccccttcgagtacccacagtactacctggagattcgcggcaccgtccgcccaaacggttttttt

SEQ ID NO: 343 - RNA, 164 nt, synthetic construct
  source 1..164: mol_type = other RNA
gctcagccaggtagtactgtgttttagagctagaaatagcaagttaaaataaggctagtccgttatcaacttgaaaaagtggcaccgagtcggtgcagccccttcgagtatccacagtactacctggcttcctaccgggtctctacgtgggggcccgttttttt

SEQ ID NO: 344 - RNA, 164 nt, synthetic construct
  source 1..164: mol_type = other RNA
gctcagccaggtagtactgtgtttaagagctagaaatagcaagtttaaataaggctagtccgttatcaacttgaaaaagtggcaccgagtcggtgcagccccttcgagtatccacagtactacctggcttcctaccgggtctctacgtgggggcccgttttttt

SEQ ID NO: 345 - RNA, 164 nt, synthetic construct
  source 1..164: mol_type = other RNA
gctcagccaggtagtactgtgtttaagagctagaaatagcaagtttaaataaggctagtccgttatcagcgtgaaaacgcggcaccgagtcggtgcagccccttcgagtatccacagtactacctggcttcctaccgggtctctacgtgggggcccgttttttt

SEQ ID NO: 346 - RNA, 164 nt, synthetic construct
  source 1..164: mol_type = other RNA
gctcagccaggtagtactgtgttttagagctagaaatagcaagttaaaataaggctagtccgttatcaacttgaaaaagtggcaccgagtcggtgcagccccttcgagtatccacagtactacctggctacttaccgggtctctacgtgggggcccgttttttt

SEQ ID NO: 347 - RNA, 164 nt, synthetic construct
  source 1..164: mol_type = other RNA
gctcagccaggtagtactgtgtttaagagctagaaatagcaagtttaaataaggctagtccgttatcaacttgaaaaagtggcaccgagtcggtgcagccccttcgagtatccacagtactacctggctacttaccgggtctctacgtgggggcccgttttttt

SEQ ID NO: 348 - RNA, 164 nt, synthetic construct
  source 1..164: mol_type = other RNA
gctcagccaggtagtactgtgtttaagagctagaaatagcaagtttaaataaggctagtccgttatcagcgtgaaaacgcggcaccgagtcggtgcagccccttcgagtatccacagtactacctggctacttaccgggtctctacgtgggggcccgttttttt

SEQ ID NO: 349 - RNA, 164 nt, synthetic construct
  source 1..164: mol_type = other RNA
gctcagccaggtagtactgtgttttagagctagaaatagcaagttaaaataaggctagtccgttatcaacttgaaaaagtggcaccgagtcggtgcagccccttcgagtatccacagtactacctggctttcaatgcggcaccgtccgcccaaacggttttttt

SEQ ID NO: 350 - RNA, 164 nt, synthetic construct
  source 1..164: mol_type = other RNA
gctcagccaggtagtactgtgtttaagagctagaaatagcaagtttaaataaggctagtccgttatcaacttgaaaaagtggcaccgagtcggtgcagccccttcgagtatccacagtactacctggctttcaatgcggcaccgtccgcccaaacggttttttt

SEQ ID NO: 351 - RNA, 164 nt, synthetic construct
  source 1..164: mol_type = other RNA
gctcagccaggtagtactgtgtttaagagctagaaatagcaagtttaaataaggctagtccgttatcagcgtgaaaacgcggcaccgagtcggtgcagccccttcgagtatccacagtactacctggctttcaatgcggcaccgtccgcccaaacggttttttt

SEQ ID NO: 352 - RNA, 164 nt, synthetic construct
  source 1..164: mol_type = other RNA
gctcagccaggtagtactgtgttttagagctagaaatagcaagttaaaataaggctagtccgttatcaacttgaaaaagtggcaccgagtcggtgcagccccttcgagtatccacagtactacctggctttctatgcggcaccgtccgcccaaacggttttttt

SEQ ID NO: 353 - RNA, 164 nt, synthetic construct
  source 1..164: mol_type = other RNA
gctcagccaggtagtactgtgtttaagagctagaaatagcaagtttaaataaggctagtccgttatcaacttgaaaaagtggcaccgagtcggtgcagccccttcgagtatccacagtactacctggctttctatgcggcaccgtccgcccaaacggttttttt

SEQ ID NO: 354 - RNA, 164 nt, synthetic construct
  source 1..164: mol_type = other RNA
gctcagccaggtagtactgtgtttaagagctagaaatagcaagtttaaataaggctagtccgttatcagcgtgaaaacgcggcaccgagtcggtgcagccccttcgagtatccacagtactacctggctttctatgcggcaccgtccgcccaaacggttttttt

SEQ ID NO: 355 - RNA, 164 nt, synthetic construct
  source 1..164: mol_type = other RNA
gctcagccaggtagtactgtgttttagagctagaaatagcaagttaaaataaggctagtccgttatcaacttgaaaaagtggcaccgagtcggtgcagccccttcgagtatccacagtactacctggaacattgacgcgtctctacgtgggggcgcgttttttt

SEQ ID NO: 356 - RNA, 165 nt, synthetic construct
  source 1..165: mol_type = other RNA
gctcagccaggtagtactgtgttttagagctagaaatagcaagttaaaataaggctagtccgttatcaacttgaaaaagtggcaccgagtcggtgcagccccttcgagtacccacagtactacctggcaacattgacgcgtctctacgtgggggcgcgttttttt

SEQ ID NO: 357 - RNA, 165 nt, synthetic construct
  source 1..165: mol_type = other RNA
gctcagccaggtagtactgtgttttagagctagaaatagcaagttaaaataaggctagtccgttatcaacttgaaaaagtggcaccgagtcggtgcagccccttcgagtatccacagtactacctggcaacattgacgcgtctctacgtgggggcgcgttttttt

SEQ ID NO: 358 - RNA, 166 nt, synthetic construct
  source 1..166: mol_type = other RNA
gctcagccaggtagtactgtgttttagagctagaaatagcaagttaaaataaggctagtccgttatcaacttgaaaaagtggcaccgagtcggtgcgtacgcagccccttcgagtacccacagtactacctggctgaacattgacgcgtctctacgtgggggcgcg

SEQ ID NO: 359 - RNA, 166 nt, synthetic construct
  source 1..166: mol_type = other RNA
gctcagccaggtagtactgtgttttagagctagaaatagcaagttaaaataaggctagtccgttatcaacttgaaaaagtggcaccgagtcggtgctggtacgcagccccttcgagtacccacagtactacctggcaacattgacgcgtctctacgtgggggcgcg

SEQ ID NO: 360 - RNA, 166 nt, synthetic construct
  source 1..166: mol_type = other RNA
gctcagccaggtagtactgtgttttagagctagaaatagcaagttaaaataaggctagtccgttatcaacttgaaaaagtggcaccgagtcggtgctgtggtacgcagccccttcgagtacccacagtactacctgaacattgacgcgtctctacgtgggggcgcg

SEQ ID NO: 361 - RNA, 166 nt, synthetic construct
  source 1..166: mol_type = other RNA
gctcagccaggtagtactgtgtttaagagcggggaaatccgcaagtttaaataaggctagtccgttatcagcgtgaaaacgcggcaccgagtcggtgcgcagccccttcgagtacccacagtactacctggatctatcgggtctctacgtgggggcccgttttttt

SEQ ID NO: 362 - RNA, 166 nt, synthetic construct
  source 1..166: mol_type = other RNA
gctcagccaggtagtactgtgtttaagagcggggaaatccgcaagtttaaataaggctagtccgttatcagcgtgaaaacgcggcaccgagtcggtgcgcagccccttcgagtacccacagtactacctggaattatcgggtctctacgtgggggcccgttttttt

SEQ ID NO: 363 - RNA, 166 nt, synthetic construct
  source 1..166: mol_type = other RNA
gctcagccaggtagtactgtgtttaagagcggggaaatccgcaagtttaaataaggctagtccgttatcagcgtgaaaacgcggcaccgagtcggtgcgcagccccttcgagtacccacagtactacctggacattcgcggcaccgtccgcccaaacggttttttt

SEQ ID NO: 364 - RNA, 166 nt, synthetic construct
  source 1..166: mol_type = other RNA
gctcagccaggtagtactgtgtttaagagcggggaaatccgcaagtttaaataaggctagtccgttatcagcgtgaaaacgcggcaccgagtcggtgcgcagccccttcgagtacccacagtactacctggagattcgcggcaccgtccgcccaaacggttttttt

SEQ ID NO: 365 - RNA, 166 nt, synthetic construct
  source 1..166: mol_type = other RNA
gctcagccaggtagtactgtgtttaagagcggggaaatccgcaagtttaaataaggctagtccgttatcagcgtgaaaacgcggcaccgagtcggtgcagccccttcgagtatccacagtactacctggcttcctaccgggtctctacgtgggggcccgttttttt

SEQ ID NO: 366 - RNA, 166 nt, synthetic construct
  source 1..166: mol_type = other RNA
gctcagccaggtagtactgtgtttaagagcggggaaatccgcaagtttaaataaggctagtccgttatcagcgtgaaaacgcggcaccgagtcggtgcagccccttcgagtatccacagtactacctggctacttaccgggtctctacgtgggggcccgttttttt

SEQ ID NO: 367 - RNA, 166 nt, synthetic construct
  source 1..166: mol_type = other RNA
gctcagccaggtagtactgtgtttaagagcggggaaatccgcaagtttaaataaggctagtccgttatcagcgtgaaaacgcggcaccgagtcggtgcagccccttcgagtatccacagtactacctggctttcaatgcggcaccgtccgcccaaacggttttttt

SEQ ID NO: 368 - RNA, 166 nt, synthetic construct
  source 1..166: mol_type = other RNA
gctcagccaggtagtactgtgtttaagagcggggaaatccgcaagtttaaataaggctagtccgttatcagcgtgaaaacgcggcaccgagtcggtgcagccccttcgagtatccacagtactacctggctttctatgcggcaccgtccgcccaaacggttttttt

SEQ ID NO: 369 - RNA, 166 nt, synthetic construct
  source 1..166: mol_type = other RNA
gctcagccaggtagtactgtgttttagagctagaaatagcaagttaaaataaggctagtccgttatcaacttgaaaaagtggcaccgagtcggtgcagccccttcgagtatccacagtactacctggctgatcttctcgggtctctacgtgggggcccgttttttt

SEQ ID NO: 370 - RNA, 166 nt, synthetic construct
  source 1..166: mol_type = other RNA
gctcagccaggtagtactgtgtttaagagctagaaatagcaagtttaaataaggctagtccgttatcaacttgaaaaagtggcaccgagtcggtgcagccccttcgagtatccacagtactacctggctgatcttctcgggtctctacgtgggggcccgttttttt

SEQ ID NO: 371 - RNA, 166 nt, synthetic construct
  source 1..166: mol_type = other RNA
gctcagccaggtagtactgtgtttaagagctagaaatagcaagtttaaataaggctagtccgttatcagcgtgaaaacgcggcaccgagtcggtgcagccccttcgagtatccacagtactacctggctgatcttctcgggtctctacgtgggggcccgttttttt

SEQ ID NO: 372 - RNA, 166 nt, synthetic construct
  source 1..166: mol_type = other RNA
gctcagccaggtagtactgtgttttagagctagaaatagcaagttaaaataaggctagtccgttatcaacttgaaaaagtggcaccgagtcggtgcagccccttcgagtatccacagtactacctggctgaattcttcgggtctctacgtgggggcccgttttttt

SEQ ID NO: 373 - RNA, 166 nt, synthetic construct
  source 1..166: mol_type = other RNA
gctcagccaggtagtactgtgtttaagagctagaaatagcaagtttaaataaggctagtccgttatcaacttgaaaaagtggcaccgagtcggtgcagccccttcgagtatccacagtactacctggctgaattcttcgggtctctacgtgggggcccgttttttt

SEQ ID NO: 374 - RNA, 166 nt, synthetic construct
  source 1..166: mol_type = other RNA
gctcagccaggtagtactgtgtttaagagctagaaatagcaagtttaaataaggctagtccgttatcagcgtgaaaacgcggcaccgagtcggtgcagccccttcgagtatccacagtactacctggctgaattcttcgggtctctacgtgggggcccgttttttt

SEQ ID NO: 375 - RNA, 166 nt, synthetic construct
  source 1..166: mol_type = other RNA
gctcagccaggtagtactgtgttttagagctagaaatagcaagttaaaataaggctagtccgttatcaacttgaaaaagtggcaccgagtcggtgcagccccttcgagtatccacagtactacctggctgaaaaaatgcggcaccgtccgcccaaacggttttttt

SEQ ID NO: 376 - RNA, 166 nt, synthetic construct
  source 1..166: mol_type = other RNA
gctcagccaggtagtactgtgtttaagagctagaaatagcaagtttaaataaggctagtccgttatcaacttgaaaaagtggcaccgagtcggtgcagccccttcgagtatccacagtactacctggctgaaaaaatgcggcaccgtccgcccaaacggttttttt

SEQ ID NO: 377 - RNA, 166 nt, synthetic construct
  source 1..166: mol_type = other RNA
gctcagccaggtagtactgtgtttaagagctagaaatagcaagtttaaataaggctagtccgttatcagcgtgaaaacgcggcaccgagtcggtgcagccccttcgagtatccacagtactacctggctgaaaaaatgcggcaccgtccgcccaaacggttttttt

SEQ ID NO: 378 - RNA, 166 nt, synthetic construct
  source 1..166: mol_type = other RNA
gctcagccaggtagtactgtgttttagagctagaaatagcaagttaaaataaggctagtccgttatcaacttgaaaaagtggcaccgagtcggtgcagccccttcgagtatccacagtactacctggctgaataaatgcggcaccgtccgcccaaacggttttttt

SEQ ID NO: 379 - RNA, 166 nt, synthetic construct
  source 1..166: mol_type = other RNA
gctcagccaggtagtactgtgtttaagagctagaaatagcaagtttaaataaggctagtccgttatcaacttgaaaaagtggcaccgagtcggtgcagccccttcgagtatccacagtactacctggctgaataaatgcggcaccgtccgcccaaacggttttttt

SEQ ID NO: 380 - RNA, 166 nt, synthetic construct
  source 1..166: mol_type = other RNA
gctcagccaggtagtactgtgtttaagagctagaaatagcaagtttaaataaggctagtccgttatcagcgtgaaaacgcggcaccgagtcggtgcagccccttcgagtatccacagtactacctggctgaataaatgcggcaccgtccgcccaaacggttttttt

SEQ ID NO: 381 - RNA, 166 nt, synthetic construct
  source 1..166: mol_type = other RNA
gctcagccaggtagtactgtgttttagagctagaaatagcaagttaaaataaggctagtccgttatcaacttgaaaaagtggcaccgagtcggtgcgcagccccttcgagtacccacagtactacctggaacattgacgcgtctctacgtgggggcgcgttttttt

SEQ ID NO: 382 - RNA, 166 nt, synthetic construct
  source 1..166: mol_type = other RNA
gctcagccaggtagtactgtgttttagagctagaaatagcaagttaaaataaggctagtccgttatcaacttgaaaaagtggcaccgagtcggtgcagccccttcgagtatccacagtactacctggctaacattgacgcgtctctacgtgggggcgcgttttttt

SEQ ID NO: 383 - RNA, 167 nt, synthetic construct
  source 1..167: mol_type = other RNA
gctcagccaggtagtactgtgttttagagctagaaatagcaagttaaaataaggctagtccgttatcaacttgaaaaagtggcaccgagtcggtgcgcagccccttcgagtacccacagtactacctggcaacattgacgcgtctctacgtgggggcgcgttttttt

SEQ ID NO: 384 - RNA, 167 nt, synthetic construct
  source 1..167: mol_type = other RNA
gctcagccaggtagtactgtgttttagagctagaaatagcaagttaaaataaggctagtccgttatcaacttgaaaaagtggcaccgagtcggtgcgcagccccttcgagtatccacagtactacctggcaacattgacgcgtctctacgtgggggcgcgttttttt

SEQ ID NO: 385 - RNA, 167 nt, synthetic construct
  source 1..167: mol_type = other RNA
gctcagccaggtagtactgtgttttagagctagaaatagcaagttaaaataaggctagtccgttatcaacttgaaaaagtggcaccgagtcggtgcagccccttcgagtatccacagtactacctggctgaacattgacgcgtctctacgtgggggcgcgttttttt

SEQ ID NO: 386 - RNA, 168 nt, synthetic construct
  source 1..168: mol_type = other RNA
gctcagccaggtagtactgtgttttagagctagaaatagcaagttaaaataaggctagtccgttatcaacttgaaaaagtggcaccgagtcggtgctggtacgcagccccttcgagtacccacagtactacctggctgaacattgacgcgtctctacgtgggggcgcg

SEQ ID NO: 387 - RNA, 168 nt, synthetic construct
  source 1..168: mol_type = other RNA
gctcagccaggtagtactgtgttttagagctagaaatagcaagttaaaataaggctagtccgttatcaacttgaaaaagtggcaccgagtcggtgctgtggtacgcagccccttcgagtacccacagtactacctggcaacattgacgcgtctctacgtgggggcgcg

SEQ ID NO: 388 - RNA, 168 nt, synthetic construct
  source 1..168: mol_type = other RNA
gctcagccaggtagtactgtgtttaagagcggggaaatccgcaagtttaaataaggctagtccgttatcagcgtgaaaacgcggcaccgagtcggtgcagccccttcgagtatccacagtactacctggctgatcttctcgggtctctacgtgggggcccgttttttt

SEQ ID NO: 389 - RNA, 168 nt, synthetic construct
  source 1..168: mol_type = other RNA
gctcagccaggtagtactgtgtttaagagcggggaaatccgcaagtttaaataaggctagtccgttatcagcgtgaaaacgcggcaccgagtcggtgcagccccttcgagtatccacagtactacctggctgaattcttcgggtctctacgtgggggcccgttttttt

SEQ ID NO: 390 - RNA, 168 nt, synthetic construct
  source 1..168: mol_type = other RNA
gctcagccaggtagtactgtgtttaagagcggggaaatccgcaagtttaaataaggctagtccgttatcagcgtgaaaacgcggcaccgagtcggtgcagccccttcgagtatccacagtactacctggctgaaaaaatgcggcaccgtccgcccaaacggttttttt

SEQ ID NO: 391 - RNA, 168 nt, synthetic construct
  source 1..168: mol_type = other RNA
gctcagccaggtagtactgtgtttaagagcggggaaatccgcaagtttaaataaggctagtccgttatcagcgtgaaaacgcggcaccgagtcggtgcagccccttcgagtatccacagtactacctggctgaataaatgcggcaccgtccgcccaaacggttttttt

SEQ ID NO: 392 - RNA, 168 nt, synthetic construct
  source 1..168: mol_type = other RNA
gctcagccaggtagtactgtgttttagagctagaaatagcaagttaaaataaggctagtccgttatcaacttgaaaaagtggcaccgagtcggtgcgcagccccttcgagtatccacagtactacctggctgatcatttcgggtctctacgtgggggcccgttttttt

SEQ ID NO: 393 - RNA, 168 nt, synthetic construct
  source 1..168: mol_type = other RNA
gctcagccaggtagtactgtgtttaagagctagaaatagcaagtttaaataaggctagtccgttatcaacttgaaaaagtggcaccgagtcggtgcgcagccccttcgagtatccacagtactacctggctgatcatttcgggtctctacgtgggggcccgttttttt

SEQ ID NO: 394 - RNA, 168 nt, synthetic construct
  source 1..168: mol_type = other RNA
gctcagccaggtagtactgtgtttaagagctagaaatagcaagtttaaataaggctagtccgttatcagcgtgaaaacgcggcaccgagtcggtgcgcagccccttcgagtatccacagtactacctggctgatcatttcgggtctctacgtgggggcccgttttttt

SEQ ID NO: 395 - RNA, 168 nt, synthetic construct
  source 1..168: mol_type = other RNA
gctcagccaggtagtactgtgttttagagctagaaatagcaagttaaaataaggctagtccgttatcaacttgaaaaagtggcaccgagtcggtgcgcagccccttcgagtatccacagtactacctggctgatatcttcgggtctctacgtgggggcccgttttttt

SEQ ID NO: 396 - RNA, 168 nt, synthetic construct
  source 1..168: mol_type = other RNA
gctcagccaggtagtactgtgtttaagagctagaaatagcaagtttaaataaggctagtccgttatcaacttgaaaaagtggcaccgagtcggtgcgcagccccttcgagtatccacagtactacctggctgatatcttcgggtctctacgtgggggcccgttttttt

SEQ ID NO: 397 - RNA, 168 nt, synthetic construct
  source 1..168: mol_type = other RNA
gctcagccaggtagtactgtgtttaagagctagaaatagcaagtttaaataaggctagtccgttatcagcgtgaaaacgcggcaccgagtcggtgcgcagccccttcgagtatccacagtactacctggctgatatcttcgggtctctacgtgggggcccgttttttt

SEQ ID NO: 398 - RNA, 168 nt, synthetic construct
  source 1..168: mol_type = other RNA
gctcagccaggtagtactgtgttttagagctagaaatagcaagttaaaataaggctagtccgttatcaacttgaaaaagtggcaccgagtcggtgcgcagccccttcgagtatccacagtactacctggctgaataaaagcggcaccgtccgcccaaacggttttttt

SEQ ID NO: 399 - RNA, 168 nt, synthetic construct
  source 1..168: mol_type = other RNA
gctcagccaggtagtactgtgtttaagagctagaaatagcaagtttaaataaggctagtccgttatcaacttgaaaaagtggcaccgagtcggtgcgcagccccttcgagtatccacagtactacctggctgaataaaagcggcaccgtccgcccaaacggttttttt

SEQ ID NO: 400 - RNA, 168 nt, synthetic construct
  source 1..168: mol_type = other RNA
gctcagccaggtagtactgtgtttaagagctagaaatagcaagtttaaataaggctagtccgttatcagcgtgaaaacgcggcaccgagtcggtgcgcagccccttcgagtatccacagtactacctggctgaataaaagcggcaccgtccgcccaaacggttttttt

SEQ ID NO: 401 - RNA, 168 nt, synthetic construct
  source 1..168: mol_type = other RNA
gctcagccaggtagtactgtgttttagagctagaaatagcaagttaaaataaggctagtccgttatcaacttgaaaaagtggcaccgagtcggtgcgcagccccttcgagtatccacagtactacctggctgaaataaagcggcaccgtccgcccaaacggttttttt

SEQ ID NO: 402 - RNA, 168 nt, synthetic construct
  source 1..168: mol_type = other RNA
gctcagccaggtagtactgtgtttaagagctagaaatagcaagtttaaataaggctagtccgttatcaacttgaaaaagtggcaccgagtcggtgcgcagccccttcgagtatccacagtactacctggctgaaataaagcggcaccgtccgcccaaacggttttttt

SEQ ID NO: 403 - RNA, 168 nt, synthetic construct
  source 1..168: mol_type = other RNA
gctcagccaggtagtactgtgtttaagagctagaaatagcaagtttaaataaggctagtccgttatcagcgtgaaaacgcggcaccgagtcggtgcgcagccccttcgagtatccacagtactacctggctgaaataaagcggcaccgtccgcccaaacggttttttt

SEQ ID NO: 404 - RNA, 168 nt, synthetic construct
  source 1..168: mol_type = other RNA
gctcagccaggtagtactgtgttttagagctagaaatagcaagttaaaataaggctagtccgttatcaacttgaaaaagtggcaccgagtcggtgcgcagccccttcgagtatccacagtactacctggctaacattgacgcgtctctacgtgggggcgcgttttttt

SEQ ID NO: 405 - RNA, 168 nt, synthetic construct
  source 1..168: mol_type = other RNA
gctcagccaggtagtactgtgttttagagctagaaatagcaagttaaaataaggctagtccgttatcaacttgaaaaagtggcaccgagtcggtgcagccccttcgagtacccacagtactacctggctgaaacattgacgcgtctctacgtgggggcgcgttttttt

SEQ ID NO: 406 - RNA, 168 nt, synthetic construct
  source 1..168: mol_type = other RNA
gctcagccaggtagtactgtgttttagagctagaaatagcaagttaaaataaggctagtccgttatcaacttgaaaaagtggcaccgagtcggtgcagccccttcgagtatccacagtactacctggctgaaacattgacgcgtctctacgtgggggcgcgttttttt

SEQ ID NO: 407 - RNA, 169 nt, synthetic construct
  source 1..169: mol_type = other RNA
gctcagccaggtagtactgtgttttagagctagaaatagcaagttaaaataaggctagtccgttatcaacttgaaaaagtggcaccgagtcggtgcgcagccccttcgagtatccacagtactacctggctgaacattgacgcgtctctacgtgggggcgcgttttttt

SEQ ID NO: 408 - RNA, 170 nt, synthetic construct
  source 1..170: mol_type = other RNA
gctcagccaggtagtactgtgttttagagctagaaatagcaagttaaaataaggctagtccgttatcaacttgaaaaagtggcaccgagtcggtgctgtggtacgcagccccttcgagtacccacagtactacctggctgaacattgacgcgtctctacgtgggggcgcg

SEQ ID NO: 409 - RNA, 170 nt, synthetic construct
  source 1..170: mol_type = other RNA
gctcagccaggtagtactgtgtttaagagcggggaaatccgcaagtttaaataaggctagtccgttatcagcgtgaaaacgcggcaccgagtcggtgcgcagccccttcgagtatccacagtactacctggctgatcatttcgggtctctacgtgggggcccgttttttt

SEQ ID NO: 410 - RNA, 170 nt, synthetic construct
  source 1..170: mol_type = other RNA
gctcagccaggtagtactgtgtttaagagcggggaaatccgcaagtttaaataaggctagtccgttatcagcgtgaaaacgcggcaccgagtcggtgcgcagccccttcgagtatccacagtactacctggctgatatcttcgggtctctacgtgggggcccgttttttt

SEQ ID NO: 411 - RNA, 170 nt, synthetic construct
  source 1..170: mol_type = other RNA
gctcagccaggtagtactgtgtttaagagcggggaaatccgcaagtttaaataaggctagtccgttatcagcgtgaaaacgcggcaccgagtcggtgcgcagccccttcgagtatccacagtactacctggctgaataaaagcggcaccgtccgcccaaacggttttttt

SEQ ID NO: 412 - RNA, 170 nt, synthetic construct
  source 1..170: mol_type = other RNA
gctcagccaggtagtactgtgtttaagagcggggaaatccgcaagtttaaataaggctagtccgttatcagcgtgaaaacgcggcaccgagtcggtgcgcagccccttcgagtatccacagtactacctggctgaaataaagcggcaccgtccgcccaaacggttttttt

SEQ ID NO: 413 - RNA, 170 nt, synthetic construct
  source 1..170: mol_type = other RNA
gctcagccaggtagtactgtgttttagagctagaaatagcaagttaaaataaggctagtccgttatcaacttgaaaaagtggcaccgagtcggtgcgcagccccttcgagtatccacagtactacctggctgaaacattgacgcgtctctacgtgggggcgcgttttttt

SEQ ID NO: 414 - RNA, 174 nt, synthetic construct
  source 1..174: mol_type = other RNA
gctcagccaggtagtactgtgtttaagagctatgctggaaacagcatagcaagtttaaataaggctagtccgttatcaacttgaaaaagtggcaccgagtcggtgcgcagccccttcgagtacccacagtactacctggatctatcgggtctctacgtgggggcccgttttttt

SEQ ID NO: 415 - RNA, 174 nt, synthetic construct
  source 1..174: mol_type = other RNA
gctcagccaggtagtactgtgtttaagagctatgctggaaacagcatagcaagtttaaataaggctagtccgttatcagcgtgaaaacgcggcaccgagtcggtgcgcagccccttcgagtacccacagtactacctggatctatcgggtctctacgtgggggcccgttttttt

SEQ ID NO: 416 - RNA, 174 nt, synthetic construct
  source 1..174: mol_type = other RNA
gctcagccaggtagtactgtgtttaagagctatgctggaaacagcatagcaagtttaaataaggctagtccgttatcaacttgaaaaagtggcaccgagtcggtgcgcagccccttcgagtacccacagtactacctggaattatcgggtctctacgtgggggcccgttttttt

SEQ ID NO: 417 - RNA, 174 nt, synthetic construct
  source 1..174: mol_type = other RNA
gctcagccaggtagtactgtgtttaagagctatgctggaaacagcatagcaagtttaaataaggctagtccgttatcagcgtgaaaacgcggcaccgagtcggtgcgcagccccttcgagtacccacagtactacctggaattatcgggtctctacgtgggggcccgttttttt

SEQ ID NO: 418 - RNA, 174 nt, synthetic construct
  source 1..174: mol_type = other RNA
gctcagccaggtagtactgtgtttaagagctatgctggaaacagcatagcaagtttaaataaggctagtccgttatcaacttgaaaaagtggcaccgagtcggtgcgcagccccttcgagtacccacagtactacctggacattcgcggcaccgtccgcccaaacggttttttt

SEQ ID NO: 419 - RNA, 174 nt, synthetic construct
  source 1..174: mol_type = other RNA
gctcagccaggtagtactgtgtttaagagctatgctggaaacagcatagcaagtttaaataaggctagtccgttatcagcgtgaaaacgcggcaccgagtcggtgcgcagccccttcgagtacccacagtactacctggacattcgcggcaccgtccgcccaaacggttttttt

SEQ ID NO: 420 - RNA, 174 nt, synthetic construct
  source 1..174: mol_type = other RNA
gctcagccaggtagtactgtgtttaagagctatgctggaaacagcatagcaagtttaaataaggctagtccgttatcaacttgaaaaagtggcaccgagtcggtgcgcagccccttcgagtacccacagtactacctggagattcgcggcaccgtccgcccaaacggttttttt

SEQ ID NO: 421 - RNA, 174 nt, synthetic construct
  source 1..174: mol_type = other RNA
gctcagccaggtagtactgtgtttaagagctatgctggaaacagcatagcaagtttaaataaggctagtccgttatcagcgtgaaaacgcggcaccgagtcggtgcgcagccccttcgagtacccacagtactacctggagattcgcggcaccgtccgcccaaacggttttttt

SEQ ID NO: 422 - RNA, 174 nt, synthetic construct
  source 1..174: mol_type = other RNA
gctcagccaggtagtactgtgtttaagagctatgctggaaacagcatagcaagtttaaataaggctagtccgttatcaacttgaaaaagtggcaccgagtcggtgcagccccttcgagtatccacagtactacctggcttcctaccgggtctctacgtgggggcccgttttttt

SEQ ID NO: 423 - RNA, 174 nt, synthetic construct
  source 1..174: mol_type = other RNA
gctcagccaggtagtactgtgtttaagagctatgctggaaacagcatagcaagtttaaataaggctagtccgttatcagcgtgaaaacgcggcaccgagtcggtgcagccccttcgagtatccacagtactacctggcttcctaccgggtctctacgtgggggcccgttttttt

SEQ ID NO: 424 - RNA, 174 nt, synthetic construct
  source 1..174: mol_type = other RNA
gctcagccaggtagtactgtgtttaagagctatgctggaaacagcatagcaagtttaaataaggctagtccgttatcaacttgaaaaagtggcaccgagtcggtgcagccccttcgagtatccacagtactacctggctacttaccgggtctctacgtgggggcccgttttttt

SEQ ID NO: 425 - RNA, 174 nt, synthetic construct
  source 1..174: mol_type = other RNA
gctcagccaggtagtactgtgtttaagagctatgctggaaacagcatagcaagtttaaataaggctagtccgttatcagcgtgaaaacgcggcaccgagtcggtgcagccccttcgagtatccacagtactacctggctacttaccgggtctctacgtgggggcccgttttttt

SEQ ID NO: 426 - RNA, 174 nt, synthetic construct
  source 1..174: mol_type = other RNA
gctcagccaggtagtactgtgtttaagagctatgctggaaacagcatagcaagtttaaataaggctagtccgttatcaacttgaaaaagtggcaccgagtcggtgcagccccttcgagtatccacagtactacctggctttcaatgcggcaccgtccgcccaaacggttttttt

SEQ ID NO: 427 - RNA, 174 nt, synthetic construct
  source 1..174: mol_type = other RNA
gctcagccaggtagtactgtgtttaagagctatgctggaaacagcatagcaagtttaaataaggctagtccgttatcagcgtgaaaacgcggcaccgagtcggtgcagccccttcgagtatccacagtactacctggctttcaatgcggcaccgtccgcccaaacggttttttt

SEQ ID NO: 428 - RNA, 174 nt, synthetic construct
  source 1..174: mol_type = other RNA
gctcagccaggtagtactgtgtttaagagctatgctggaaacagcatagcaagtttaaataaggctagtccgttatcaacttgaaaaagtggcaccgagtcggtgcagccccttcgagtatccacagtactacctggctttctatgcggcaccgtccgcccaaacggttttttt

SEQ ID NO: 429 - RNA, 174 nt, synthetic construct
  source 1..174: mol_type = other RNA
gctcagccaggtagtactgtgtttaagagctatgctggaaacagcatagcaagtttaaataaggctagtccgttatcagcgtgaaaacgcggcaccgagtcggtgcagccccttcgagtatccacagtactacctggctttctatgcggcaccgtccgcccaaacggttttttt

SEQ ID NO: 430 - RNA, 176 nt, synthetic construct
  source 1..176: mol_type = other RNA
gctcagccaggtagtactgtgtttaagagctatgctggaaacagcatagcaagtttaaataaggctagtccgttatcaacttgaaaaagtggcaccgagtcggtgcagccccttcgagtatccacagtactacctggctgatcttctcgggtctctacgtgggggcccgttttttt

SEQ ID NO: 431 - RNA, 176 nt, synthetic construct
  source 1..176: mol_type = other RNA
gctcagccaggtagtactgtgtttaagagctatgctggaaacagcatagcaagtttaaataaggctagtccgttatcagcgtgaaaacgcggcaccgagtcggtgcagccccttcgagtatccacagtactacctggctgatcttctcgggtctctacgtgggggcccgttttttt

SEQ ID NO: 432 - RNA, 176 nt, synthetic construct
  source 1..176: mol_type = other RNA
gctcagccaggtagtactgtgtttaagagctatgctggaaacagcatagcaagtttaaataaggctagtccgttatcaacttgaaaaagtggcaccgagtcggtgcagccccttcgagtatccacagtactacctggctgaattcttcgggtctctacgtgggggcccgttttttt

SEQ ID NO: 433 - RNA, 176 nt, synthetic construct
  source 1..176: mol_type = other RNA
gctcagccaggtagtactgtgtttaagagctatgctggaaacagcatagcaagtttaaataaggctagtccgttatcagcgtgaaaacgcggcaccgagtcggtgcagccccttcgagtatccacagtactacctggctgaattcttcgggtctctacgtgggggcccgttttttt

SEQ ID NO: 434 - RNA, 176 nt, synthetic construct
  source 1..176: mol_type = other RNA
gctcagccaggtagtactgtgtttaagagctatgctggaaacagcatagcaagtttaaataaggctagtccgttatcaacttgaaaaagtggcaccgagtcggtgcagccccttcgagtatccacagtactacctggctgaaaaaatgcggcaccgtccgcccaaacggttttttt

SEQ ID NO: 435 - RNA, 176 nt, synthetic construct
  source 1..176: mol_type = other RNA
gctcagccaggtagtactgtgtttaagagctatgctggaaacagcatagcaagtttaaataaggctagtccgttatcagcgtgaaaacgcggcaccgagtcggtgcagccccttcgagtatccacagtactacctggctgaaaaaatgcggcaccgtccgcccaaacggttttttt

SEQ ID NO: 436 - RNA, 176 nt, synthetic construct
  source 1..176: mol_type = other RNA
gctcagccaggtagtactgtgtttaagagctatgctggaaacagcatagcaagtttaaataaggctagtccgttatcaacttgaaaaagtggcaccgagtcggtgcagccccttcgagtatccacagtactacctggctgaataaatgcggcaccgtccgcccaaacggttttttt

SEQ ID NO: 437 - RNA, 176 nt, synthetic construct
  source 1..176: mol_type = other RNA
gctcagccaggtagtactgtgtttaagagctatgctggaaacagcatagcaagtttaaataaggctagtccgttatcagcgtgaaaacgcggcaccgagtcggtgcagccccttcgagtatccacagtactacctggctgaataaatgcggcaccgtccgcccaaacggttttttt

SEQ ID NO: 438 - RNA, 178 nt, synthetic construct
  source 1..178: mol_type = other RNA
gctcagccaggtagtactgtgtttaagagctatgctggaaacagcatagcaagtttaaataaggctagtccgttatcaacttgaaaaagtggcaccgagtcggtgcgcagccccttcgagtatccacagtactacctggctgatcatttcgggtctctacgtgggggcccgttttttt

SEQ ID NO: 439 - RNA, 178 nt, synthetic construct
  source 1..178: mol_type = other RNA
gctcagccaggtagtactgtgtttaagagctatgctggaaacagcatagcaagtttaaataaggctagtccgttatcagcgtgaaaacgcggcaccgagtcggtgcgcagccccttcgagtatccacagtactacctggctgatcatttcgggtctctacgtgggggcccgttttttt

SEQ ID NO: 440 - RNA, 178 nt, synthetic construct
  source 1..178: mol_type = other RNA
gctcagccaggtagtactgtgtttaagagctatgctggaaacagcatagcaagtttaaataaggctagtccgttatcaacttgaaaaagtggcaccgagtcggtgcgcagccccttcgagtatccacagtactacctggctgatatcttcgggtctctacgtgggggcccgttttttt

SEQ ID NO: 441 - RNA, 178 nt, synthetic construct
  source 1..178: mol_type = other RNA
gctcagccaggtagtactgtgtttaagagctatgctggaaacagcatagcaagtttaaataaggctagtccgttatcagcgtgaaaacgcggcaccgagtcggtgcgcagccccttcgagtatccacagtactacctggctgatatcttcgggtctctacgtgggggcccgttttttt

SEQ ID NO: 442 - RNA, 178 nt, synthetic construct
  source 1..178: mol_type = other RNA
gctcagccaggtagtactgtgtttaagagctatgctggaaacagcatagcaagtttaaataaggctagtccgttatcaacttgaaaaagtggcaccgagtcggtgcgcagccccttcgagtatccacagtactacctggctgaataaaagcggcaccgtccgcccaaacggttttttt

SEQ ID NO: 443 - RNA, 178 nt, synthetic construct
  source 1..178: mol_type = other RNA
gctcagccaggtagtactgtgtttaagagctatgctggaaacagcatagcaagtttaaataaggctagtccgttatcagcgtgaaaacgcggcaccgagtcggtgcgcagccccttcgagtatccacagtactacctggctgaataaaagcggcaccgtccgcccaaacggttttttt

SEQ ID NO: 444 - RNA, 178 nt, synthetic construct
  source 1..178: mol_type = other RNA
gctcagccaggtagtactgtgtttaagagctatgctggaaacagcatagcaagtttaaataaggctagtccgttatcaacttgaaaaagtggcaccgagtcggtgcgcagccccttcgagtatccacagtactacctggctgaaataaagcggcaccgtccgcccaaacggttttttt

SEQ ID NO: 445 - RNA, 178 nt, synthetic construct
  source 1..178: mol_type = other RNA
gctcagccaggtagtactgtgtttaagagctatgctggaaacagcatagcaagtttaaataaggctagtccgttatcagcgtgaaaacgcggcaccgagtcggtgcgcagccccttcgagtatccacagtactacctggctgaaataaagcggcaccgtccgcccaaacggttttttt

SEQ ID NO: 446 - RNA, 179 nt, synthetic construct
  source 1..179: mol_type = other RNA
gctcagccaggtagtactgtgttttagagctagaaatagcaagttaaaataaggctagtccgttatcaacttgaaaaagtggcaccgagtcggtgcgcagccccttcgagtacccacagtactacctggaagtcccgcggttctatctagttacgcgttaaaccaactagaattttttt

SEQ ID NO: 447 - RNA, 179 nt, synthetic construct
  source 1..179: mol_type = other RNA
gctcagccaggtagtactgtgtttaagagctagaaatagcaagtttaaataaggctagtccgttatcaacttgaaaaagtggcaccgagtcggtgcgcagccccttcgagtacccacagtactacctggaagtcccgcggttctatctagttacgcgttaaaccaactagaattttttt

SEQ ID NO: 448 - RNA, 179 nt, synthetic construct
  source 1..179: mol_type = other RNA
gctcagccaggtagtactgtgtttaagagctagaaatagcaagtttaaataaggctagtccgttatcagcgtgaaaacgcggcaccgagtcggtgcgcagccccttcgagtacccacagtactacctggaagtcccgcggttctatctagttacgcgttaaaccaactagaattttttt

SEQ ID NO: 449 - RNA, 179 nt, synthetic construct
  source 1..179: mol_type = other RNA
gctcagccaggtagtactgtgttttagagctagaaatagcaagttaaaataaggctagtccgttatcaacttgaaaaagtggcaccgagtcggtgcgcagccccttcgagtacccacagtactacctggagtatccgcggttctatctagttacgcgttaaaccaactagaattttttt

SEQ ID NO: 450 - RNA, 179 nt, synthetic construct
  source 1..179: mol_type = other RNA
gctcagccaggtagtactgtgtttaagagctagaaatagcaagtttaaataaggctagtccgttatcaacttgaaaaagtggcaccgagtcggtgcgcagccccttcgagtacccacagtactacctggagtatccgcggttctatctagttacgcgttaaaccaactagaattttttt

SEQ ID NO: 451 - RNA, 179 nt, synthetic construct
  source 1..179: mol_type = other RNA
gctcagccaggtagtactgtgtttaagagctagaaatagcaagtttaaataaggctagtccgttatcagcgtgaaaacgcggcaccgagtcggtgcgcagccccttcgagtacccacagtactacctggagtatccgcggttctatctagttacgcgttaaaccaactagaattttttt

SEQ ID NO: 452 - RNA, 179 nt, synthetic construct
  source 1..179: mol_type = other RNA
gctcagccaggtagtactgtgttttagagctagaaatagcaagttaaaataaggctagtccgttatcaacttgaaaaagtggcaccgagtcggtgcagccccttcgagtatccacagtactacctggctcctctccgcggttctatctagttacgcgttaaaccaactagaattttttt

SEQ ID NO: 453 - RNA, 179 nt, synthetic construct
  source 1..179: mol_type = other RNA
gctcagccaggtagtactgtgtttaagagctagaaatagcaagtttaaataaggctagtccgttatcaacttgaaaaagtggcaccgagtcggtgcagccccttcgagtatccacagtactacctggctcctctccgcggttctatctagttacgcgttaaaccaactagaattttttt

SEQ ID NO: 454 - RNA, 179 nt, synthetic construct
  source 1..179: mol_type = other RNA
gctcagccaggtagtactgtgtttaagagctagaaatagcaagtttaaataaggctagtccgttatcagcgtgaaaacgcggcaccgagtcggtgcagccccttcgagtatccacagtactacctggctcctctccgcggttctatctagttacgcgttaaaccaactagaattttttt

SEQ ID NO: 455 - RNA, 179 nt, synthetic construct
  source 1..179: mol_type = other RNA
gctcagccaggtagtactgtgttttagagctagaaatagcaagttaaaataaggctagtccgttatcaacttgaaaaagtggcaccgagtcggtgcagccccttcgagtatccacagtactacctggctcctcatcgcggttctatctagttacgcgttaaaccaactagaattttttt

SEQ ID NO: 456 - RNA, 179 nt, synthetic construct
  source 1..179: mol_type = other RNA
gctcagccaggtagtactgtgtttaagagctagaaatagcaagtttaaataaggctagtccgttatcaacttgaaaaagtggcaccgagtcggtgcagccccttcgagtatccacagtactacctggctcctcatcgcggttctatctagttacgcgttaaaccaactagaattttttt

SEQ ID NO: 457 - RNA, 179 nt, synthetic construct
  source 1..179: mol_type = other RNA
gctcagccaggtagtactgtgtttaagagctagaaatagcaagtttaaataaggctagtccgttatcagcgtgaaaacgcggcaccgagtcggtgcagccccttcgagtatccacagtactacctggctcctcatcgcggttctatctagttacgcgttaaaccaactagaattttttt

SEQ ID NO: 458 - RNA, 181 nt, synthetic construct
  source 1..181: mol_type = other RNA
gctcagccaggtagtactgtgtttaagagcggggaaatccgcaagtttaaataaggctagtccgttatcagcgtgaaaacgcggcaccgagtcggtgcgcagccccttcgagtacccacagtactacctggaagtcccgcggttctatctagttacgcgttaaaccaactagaattttttt

SEQ ID NO: 459 - RNA, 181 nt, synthetic construct
  source 1..181: mol_type = other RNA
gctcagccaggtagtactgtgtttaagagcggggaaatccgcaagtttaaataaggctagtccgttatcagcgtgaaaacgcggcaccgagtcggtgcgcagccccttcgagtacccacagtactacctggagtatccgcggttctatctagttacgcgttaaaccaactagaattttttt

SEQ ID NO: 460 - RNA, 181 nt, synthetic construct
  source 1..181: mol_type = other RNA
gctcagccaggtagtactgtgtttaagagcggggaaatccgcaagtttaaataaggctagtccgttatcagcgtgaaaacgcggcaccgagtcggtgcagccccttcgagtatccacagtactacctggctcctctccgcggttctatctagttacgcgttaaaccaactagaattttttt

SEQ ID NO: 461 - RNA, 181 nt, synthetic construct
  source 1..181: mol_type = other RNA
gctcagccaggtagtactgtgtttaagagcggggaaatccgcaagtttaaataaggctagtccgttatcagcgtgaaaacgcggcaccgagtcggtgcagccccttcgagtatccacagtactacctggctcctcatcgcggttctatctagttacgcgttaaaccaactagaattttttt

SEQ ID NO: 462 - RNA, 181 nt, synthetic construct
  source 1..181: mol_type = other RNA
gctcagccaggtagtactgtgttttagagctagaaatagcaagttaaaataaggctagtccgttatcaacttgaaaaagtggcaccgagtcggtgcagccccttcgagtatccacagtactacctggctgaaaaatccgcggttctatctagttacgcgttaaaccaactagaattttttt

SEQ ID NO: 463 - RNA, 181 nt, synthetic construct
  source 1..181: mol_type = other RNA
gctcagccaggtagtactgtgtttaagagctagaaatagcaagtttaaataaggctagtccgttatcaacttgaaaaagtggcaccgagtcggtgcagccccttcgagtatccacagtactacctggctgaaaaatccgcggttctatctagttacgcgttaaaccaactagaattttttt

SEQ ID NO: 464 - RNA, 181 nt, synthetic construct
  source 1..181: mol_type = other RNA
gctcagccaggtagtactgtgtttaagagctagaaatagcaagtttaaataaggctagtccgttatcagcgtgaaaacgcggcaccgagtcggtgcagccccttcgagtatccacagtactacctggctgaaaaatccgcggttctatctagttacgcgttaaaccaactagaattttttt

SEQ ID NO: 465 - RNA, 181 nt, synthetic construct
  source 1..181: mol_type = other RNA
gctcagccaggtagtactgtgttttagagctagaaatagcaagttaaaataaggctagtccgttatcaacttgaaaaagtggcaccgagtcggtgcagccccttcgagtatccacagtactacctggctgaaaacatcgcggttctatctagttacgcgttaaaccaactagaattttttt

SEQ ID NO: 466 - RNA, 181 nt, synthetic construct
  source 1..181: mol_type = other RNA
gctcagccaggtagtactgtgtttaagagctagaaatagcaagtttaaataaggctagtccgttatcaacttgaaaaagtggcaccgagtcggtgcagccccttcgagtatccacagtactacctggctgaaaacatcgcggttctatctagttacgcgttaaaccaactagaattttttt

SEQ ID NO: 467 - RNA, 181 nt, synthetic construct
  source 1..181: mol_type = other RNA
gctcagccaggtagtactgtgtttaagagctagaaatagcaagtttaaataaggctagtccgttatcagcgtgaaaacgcggcaccgagtcggtgcagccccttcgagtatccacagtactacctggctgaaaacatcgcggttctatctagttacgcgttaaaccaactagaattttttt

SEQ ID NO: 468 - RNA, 183 nt, synthetic construct
  source 1..183: mol_type = other RNA
gctcagccaggtagtactgtgtttaagagcggggaaatccgcaagtttaaataaggctagtccgttatcagcgtgaaaacgcggcaccgagtcggtgcagccccttcgagtatccacagtactacctggctgaaaaatccgcggttctatctagttacgcgttaaaccaactagaattttttt

SEQ ID NO: 469 - RNA, 183 nt, synthetic construct
  source 1..183: mol_type = other RNA
gctcagccaggtagtactgtgtttaagagcggggaaatccgcaagtttaaataaggctagtccgttatcagcgtgaaaacgcggcaccgagtcggtgcagccccttcgagtatccacagtactacctggctgaaaacatcgcggttctatctagttacgcgttaaaccaactagaattttttt

SEQ ID NO: 470 - RNA, 183 nt, synthetic construct
  source 1..183: mol_type = other RNA
gctcagccaggtagtactgtgttttagagctagaaatagcaagttaaaataaggctagtccgttatcaacttgaaaaagtggcaccgagtcggtgcgcagccccttcgagtatccacagtactacctggctgattcatccgcggttctatctagttacgcgttaaaccaactagaattttttt

SEQ ID NO: 471 - RNA, 183 nt, synthetic construct
  source 1..183: mol_type = other RNA
gctcagccaggtagtactgtgtttaagagctagaaatagcaagtttaaataaggctagtccgttatcaacttgaaaaagtggcaccgagtcggtgcgcagccccttcgagtatccacagtactacctggctgattcatccgcggttctatctagttacgcgttaaaccaactagaattttttt

SEQ ID NO: 472 - RNA, 183 nt, synthetic construct
  source 1..183: mol_type = other RNA
gctcagccaggtagtactgtgtttaagagctagaaatagcaagtttaaataaggctagtccgttatcagcgtgaaaacgcggcaccgagtcggtgcgcagccccttcgagtatccacagtactacctggctgattcatccgcggttctatctagttacgcgttaaaccaactagaattttttt

SEQ ID NO: 473 - RNA, 183 nt, synthetic construct
  source 1..183: mol_type = other RNA
gctcagccaggtagtactgtgttttagagctagaaatagcaagttaaaataaggctagtccgttatcaacttgaaaaagtggcaccgagtcggtgcgcagccccttcgagtatccacagtactacctggctgaatatcccgcggttctatctagttacgcgttaaaccaactagaattttttt

SEQ ID NO: 474 - RNA, 183 nt, synthetic construct
  source 1..183: mol_type = other RNA
gctcagccaggtagtactgtgtttaagagctagaaatagcaagtttaaataaggctagtccgttatcaacttgaaaaagtggcaccgagtcggtgcgcagccccttcgagtatccacagtactacctggctgaatatcccgcggttctatctagttacgcgttaaaccaactagaattttttt

SEQ ID NO: 475 - RNA, 183 nt, synthetic construct
  source 1..183: mol_type = other RNA
gctcagccaggtagtactgtgtttaagagctagaaatagcaagtttaaataaggctagtccgttatcagcgtgaaaacgcggcaccgagtcggtgcgcagccccttcgagtatccacagtactacctggctgaatatcccgcggttctatctagttacgcgttaaaccaactagaattttttt

SEQ ID NO: 476 - RNA, 185 nt, synthetic construct
  source 1..185: mol_type = other RNA
gctcagccaggtagtactgtgtttaagagcggggaaatccgcaagtttaaataaggctagtccgttatcagcgtgaaaacgcggcaccgagtcggtgcgcagccccttcgagtatccacagtactacctggctgattcatccgcggttctatctagttacgcgttaaaccaactagaattttttt

SEQ ID NO: 477 - RNA, 185 nt, synthetic construct
  source 1..185: mol_type = other RNA
gctcagccaggtagtactgtgtttaagagcggggaaatccgcaagtttaaataaggctagtccgttatcagcgtgaaaacgcggcaccgagtcggtgcgcagccccttcgagtatccacagtactacctggctgaatatcccgcggttctatctagttacgcgttaaaccaactagaattttttt

SEQ ID NO: 478 - RNA, 189 nt, synthetic construct
  source 1..189: mol_type = other RNA
gctcagccaggtagtactgtgtttaagagctatgctggaaacagcatagcaagtttaaataaggctagtccgttatcaacttgaaaaagtggcaccgagtcggtgcgcagccccttcgagtacccacagtactacctggaagtcccgcggttctatctagttacgcgttaaaccaactagaattttttt

SEQ ID NO: 479 - RNA, 189 nt, synthetic construct
  source 1..189: mol_type = other RNA
gctcagccaggtagtactgtgtttaagagctatgctggaaacagcatagcaagtttaaataaggctagtccgttatcagcgtgaaaacgcggcaccgagtcggtgcgcagccccttcgagtacccacagtactacctggaagtcccgcggttctatctagttacgcgttaaaccaactagaattttttt

SEQ ID NO: 480 - RNA, 189 nt, synthetic construct
  source 1..189: mol_type = other RNA
gctcagccaggtagtactgtgtttaagagctatgctggaaacagcatagcaagtttaaataaggctagtccgttatcaacttgaaaaagtggcaccgagtcggtgcgcagccccttcgagtacccacagtactacctggagtatccgcggttctatctagttacgcgttaaaccaactagaattttttt

SEQ ID NO: 481 - RNA, 189 nt, synthetic construct
  source 1..189: mol_type = other RNA
gctcagccaggtagtactgtgtttaagagctatgctggaaacagcatagcaagtttaaataaggctagtccgttatcagcgtgaaaacgcggcaccgagtcggtgcgcagccccttcgagtacccacagtactacctggagtatccgcggttctatctagttacgcgttaaaccaactagaattttttt

SEQ ID NO: 482 - RNA, 189 nt, synthetic construct
  source 1..189: mol_type = other RNA
gctcagccaggtagtactgtgtttaagagctatgctggaaacagcatagcaagtttaaataaggctagtccgttatcaacttgaaaaagtggcaccgagtcggtgcagccccttcgagtatccacagtactacctggctcctctccgcggttctatctagttacgcgttaaaccaactagaattttttt

SEQ ID NO: 483 - RNA, 189 nt, synthetic construct
  source 1..189: mol_type = other RNA
gctcagccaggtagtactgtgtttaagagctatgctggaaacagcatagcaagtttaaataaggctagtccgttatcagcgtgaaaacgcggcaccgagtcggtgcagccccttcgagtatccacagtactacctggctcctctccgcggttctatctagttacgcgttaaaccaactagaattttttt

SEQ ID NO: 484 - RNA, 189 nt, synthetic construct
  source 1..189: mol_type = other RNA
gctcagccaggtagtactgtgtttaagagctatgctggaaacagcatagcaagtttaaataaggctagtccgttatcaacttgaaaaagtggcaccgagtcggtgcagccccttcgagtatccacagtactacctggctcctcatcgcggttctatctagttacgcgttaaaccaactagaattttttt

SEQ ID NO: 485 - RNA, 189 nt, synthetic construct
  source 1..189: mol_type = other RNA
gctcagccaggtagtactgtgtttaagagctatgctggaaacagcatagcaagtttaaataaggctagtccgttatcagcgtgaaaacgcggcaccgagtcggtgcagccccttcgagtatccacagtactacctggctcctcatcgcggttctatctagttacgcgttaaaccaactagaattttttt

SEQ ID NO: 486 - RNA, 191 nt, synthetic construct
  source 1..191: mol_type = other RNA
gctcagccaggtagtactgtgtttaagagctatgctggaaacagcatagcaagtttaaataaggctagtccgttatcaacttgaaaaagtggcaccgagtcggtgcagccccttcgagtatccacagtactacctggctgaaaaatccgcggttctatctagttacgcgttaaaccaactagaattttttt

SEQ ID NO: 487 - RNA, 191 nt, synthetic construct
  source 1..191: mol_type = other RNA
gctcagccaggtagtactgtgtttaagagctatgctggaaacagcatagcaagtttaaataaggctagtccgttatcagcgtgaaaacgcggcaccgagtcggtgcagccccttcgagtatccacagtactacctggctgaaaaatccgcggttctatctagttacgcgttaaaccaactagaattttttt

SEQ ID NO: 488 - RNA, 191 nt, synthetic construct
  source 1..191: mol_type = other RNA
gctcagccaggtagtactgtgtttaagagctatgctggaaacagcatagcaagtttaaataaggctagtccgttatcaacttgaaaaagtggcaccgagtcggtgcagccccttcgagtatccacagtactacctggctgaaaacatcgcggttctatctagttacgcgttaaaccaactagaattttttt

SEQ ID NO: 489 - RNA, 191 nt, synthetic construct
  source 1..191: mol_type = other RNA
gctcagccaggtagtactgtgtttaagagctatgctggaaacagcatagcaagtttaaataaggctagtccgttatcagcgtgaaaacgcggcaccgagtcggtgcagccccttcgagtatccacagtactacctggctgaaaacatcgcggttctatctagttacgcgttaaaccaactagaattttttt

SEQ ID NO: 490 - RNA, 193 nt, synthetic construct
  source 1..193: mol_type = other RNA
gctcagccaggtagtactgtgtttaagagctatgctggaaacagcatagcaagtttaaataaggctagtccgttatcaacttgaaaaagtggcaccgagtcggtgcgcagccccttcgagtatccacagtactacctggctgattcatccgcggttctatctagttacgcgttaaaccaactagaattttttt

SEQ ID NO: 491 - RNA, 193 nt, synthetic construct
  source 1..193: mol_type = other RNA
gctcagccaggtagtactgtgtttaagagctatgctggaaacagcatagcaagtttaaataaggctagtccgttatcagcgtgaaaacgcggcaccgagtcggtgcgcagccccttcgagtatccacagtactacctggctgattcatccgcggttctatctagttacgcgttaaaccaactagaattttttt

SEQ ID NO: 492 - RNA, 193 nt, synthetic construct
  source 1..193: mol_type = other RNA
gctcagccaggtagtactgtgtttaagagctatgctggaaacagcatagcaagtttaaataaggctagtccgttatcaacttgaaaaagtggcaccgagtcggtgcgcagccccttcgagtatccacagtactacctggctgaatatcccgcggttctatctagttacgcgttaaaccaactagaattttttt

SEQ ID NO: 493 - RNA, 193 nt, synthetic construct
  source 1..193: mol_type = other RNA
gctcagccaggtagtactgtgtttaagagctatgctggaaacagcatagcaagtttaaataaggctagtccgttatcagcgtgaaaacgcggcaccgagtcggtgcgcagccccttcgagtatccacagtactacctggctgaatatcccgcggttctatctagttacgcgttaaaccaactagaattttttt

SEQ ID NO: 494 - RNA, 96 nt, synthetic construct
  source 1..96: mol_type = other RNA
cgagtacccacagtactaccgttttagagctagaaatagcaagttaaaataaggctagtccgttatcaacttgaaaaagtggcaccgagtcggtgc

SEQ ID NO: 495 - RNA, 96 nt, synthetic construct
  source 1..96: mol_type = other RNA
cgagtatccacagtactaccgttttagagctagaaatagcaagttaaaataaggctagtccgttatcaacttgaaaaagtggcaccgagtcggtgc

SEQ ID NO: 496 - RNA, 96 nt, synthetic construct
  source 1..96: mol_type = other RNA
cttctccaatgcgacgggtggttttagagctagaaatagcaagttaaaataaggctagtccgttatcaacttgaaaaagtggcaccgagtcggtgc

SEQ ID NO: 497 - RNA, 96 nt, synthetic construct
  source 1..96: mol_type = other RNA
gtgcccttctccaatgcgacgttttagagctagaaatagcaagttaaaataaggctagtccgttatcaacttgaaaaagtggcaccgagtcggtgc

SEQ ID NO: 498 - RNA, 96 nt, synthetic construct
  source 1..96: mol_type = other RNA
cgtgcccttctccaatgcgagttttagagctagaaatagcaagttaaaataaggctagtccgttatcaacttgaaaaagtggcaccgagtcggtgc

SEQ ID NO: 499 - RNA, 96 nt, synthetic construct
  source 1..96: mol_type = other RNA
acagccatgaatggcacagagttttagagctagaaatagcaagttaaaataaggctagtccgttatcaacttgaaaaagtggcaccgagtcggtgc

SEQ ID NO: 500 - RNA, 96 nt, synthetic construct
  source 1..96: mol_type = other RNA
acaagggccacagccatgaagttttagagctagaaatagcaagttaaaataaggctagtccgttatcaacttgaaaaagtggcaccgagtcggtgc

SEQ ID NO: 501 - RNA, 96 nt, synthetic construct
  source 1..96: mol_type = other RNA
cagccacgggtcagccacaagttttagagctagaaatagcaagttaaaataaggctagtccgttatcaacttgaaaaagtggcaccgagtcggtgc

SEQ ID NO: 502 - RNA, 97 nt, synthetic construct
  source 1..97: mol_type = other RNA
gcgtgcccttctccaatgcgagttttagagctagaaatagcaagttaaaataaggctagtccgttatcaacttgaaaaagtggcaccgagtcggtgc

SEQ ID NO: 503 - RNA, 97 nt, synthetic construct
  source 1..97: mol_type = other RNA
gacagccatgaatggcacagagttttagagctagaaatagcaagttaaaataaggctagtccgttatcaacttgaaaaagtggcaccgagtcggtgc

SEQ ID NO: 504 - RNA, 97 nt, synthetic construct
  source 1..97: mol_type = other RNA
gcgagtacccacagtactaccgttttagagctagaaatagcaagttaaaataaggctagtccgttatcaacttgaaaaagtggcaccgagtcggtgc

SEQ ID NO: 505 - RNA, 126 nt, synthetic construct
  source 1..126: mol_type = other RNA
cgagtacccacagtactaccgttttagagctagaaatagcaagttaaaataaggctagtccgttatcaacttgaaaaagtggcaccgagtcggtgcaacattgacgcgtctctacgtgggggcgcg

SEQ ID NO: 506 - RNA, 126 nt, synthetic construct
  source 1..126: mol_type = other RNA
cgagtatccacagtactaccgttttagagctagaaatagcaagttaaaataaggctagtccgttatcaacttgaaaaagtggcaccgagtcggtgcaacattgacgcgtctctacgtgggggcgcg

SEQ ID NO: 507 - RNA, 126 nt, synthetic construct
  source 1..126: mol_type = other RNA
cttctccaatgcgacgggtggttttagagctagaaatagcaagttaaaataaggctagtccgttatcaacttgaaaaagtggcaccgagtcggtgcaacattgacgcgtctctacgtgggggcgcg

SEQ ID NO: 508 - RNA, 126 nt, synthetic construct
  source 1..126: mol_type = other RNA
gtgcccttctccaatgcgacgttttagagctagaaatagcaagttaaaataaggctagtccgttatcaacttgaaaaagtggcaccgagtcggtgcaacattgacgcgtctctacgtgggggcgcg

SEQ ID NO: 509 - RNA, 126 nt, synthetic construct
  source 1..126: mol_type = other RNA
cgtgcccttctccaatgcgagttttagagctagaaatagcaagttaaaataaggctagtccgttatcaacttgaaaaagtggcaccgagtcggtgcaacattgacgcgtctctacgtgggggcgcg

SEQ ID NO: 510 - RNA, 126 nt, synthetic construct
  source 1..126: mol_type = other RNA
acagccatgaatggcacagagttttagagctagaaatagcaagttaaaataaggctagtccgttatcaacttgaaaaagtggcaccgagtcggtgcaacattgacgcgtctctacgtgggggcgcg

SEQ ID NO: 511 - RNA, 126 nt, synthetic construct
  source 1..126: mol_type = other RNA
acaagggccacagccatgaagttttagagctagaaatagcaagttaaaataaggctagtccgttatcaacttgaaaaagtggcaccgagtcggtgcaacattgacgcgtctctacgtgggggcgcg

SEQ ID NO: 512 - RNA, 126 nt, synthetic construct
  source 1..126: mol_type = other RNA
cagccacgggtcagccacaagttttagagctagaaatagcaagttaaaataaggctagtccgttatcaacttgaaaaagtggcaccgagtcggtgcaacattgacgcgtctctacgtgggggcgcg

SEQ ID NO: 513 - RNA, 133 nt, synthetic construct
  source 1..133: mol_type = other RNA
gtgcccttctccaatgcgacgttttagagctagaaatagcaagttaaaataaggctagtccgttatcaacttgaaaaagtggcaccgagtcggtgcaacattgacgcgtctctacgtgggggcgcgttttttt

SEQ ID NO: 514 - RNA, 134 nt, synthetic construct
  source 1..134: mol_type = other RNA
gcgtgcccttctccaatgcgagttttagagctagaaatagcaagttaaaataaggctagtccgttatcaacttgaaaaagtggcaccgagtcggtgcaacattgacgcgtctctacgtgggggcgcgttttttt

SEQ ID NO: 515 - RNA, 134 nt, synthetic construct
  source 1..134: mol_type = other RNA
gacagccatgaatggcacagagttttagagctagaaatagcaagttaaaataaggctagtccgttatcaacttgaaaaagtggcaccgagtcggtgcaacattgacgcgtctctacgtgggggcgcgttttttt

SEQ ID NO: 516 - RNA, 134 nt, synthetic construct
  source 1..134: mol_type = other RNA
gcgagtacccacagtactaccgttttagagctagaaatagcaagttaaaataaggctagtccgttatcaacttgaaaaagtggcaccgagtcggtgcaacattgacgcgtctctacgtgggggcgcgttttttt

SEQ ID NO: 517 - RNA, 17 nt, synthetic construct
  source 1..17: mol_type = other RNA
actgtgggtactcgaag

SEQ ID NO: 518 - RNA, 18 nt, synthetic construct
  source 1..18: mol_type = other RNA
tactgtgggtactcgaag

SEQ ID NO: 519 - RNA, 19 nt, synthetic construct
  source 1..19: mol_type = other RNA
gtactgtgggtactcgaag

SEQ ID NO: 520 - RNA, 20 nt, synthetic construct
  source 1..20: mol_type = other RNA
agtactgtgggtactcgaag

SEQ ID NO: 521 - RNA, 21 nt, synthetic construct
  source 1..21: mol_type = other RNA
tagtactgtgggtactcgaag

SEQ ID NO: 522 - RNA, 22 nt, synthetic construct
  source 1..22: mol_type = other RNA
gtagtactgtgggtactcgaag

SEQ ID NO: 523-527 - skipped (5 entries)

SEQ ID NO: 528 - RNA, 10 nt, synthetic construct
  source 1..10: mol_type = other RNA
cgagtaccca

SEQ ID NO: 529 - RNA, 11 nt, synthetic construct
  source 1..11: mol_type = other RNA
cgagtacccac

SEQ ID NO: 530 - RNA, 12 nt, synthetic construct
  source 1..12: mol_type = other RNA
cgagtacccaca

SEQ ID NO: 531 - RNA, 13 nt, synthetic construct
  source 1..13: mol_type = other RNA
cgagtacccacag

SEQ ID NO: 532 - RNA, 14 nt, synthetic construct
  source 1..14: mol_type = other RNA
cgagtacccacagt

SEQ ID NO: 533 - RNA, 15 nt, synthetic construct
  source 1..15: mol_type = other RNA
cgagtacccacagta

SEQ ID NO: 534 - RNA, 16 nt, synthetic construct
  source 1..16: mol_type = other RNA
cgagtacccacagtac

SEQ ID NO: 535 - RNA, 17 nt, synthetic construct
  source 1..17: mol_type = other RNA
cgagtacccacagtact

SEQ ID NO: 536 - RNA, 18 nt, synthetic construct
  source 1..18: mol_type = other RNA
cgagtacccacagtacta

SEQ ID NO: 537 - RNA, 19 nt, synthetic construct
  source 1..19: mol_type = other RNA
cgagtacccacagtactac

SEQ ID NO: 538 - RNA, 10 nt, synthetic construct
  source 1..10: mol_type = other RNA
gcagcccctt

SEQ ID NO: 539 - RNA, 10 nt, synthetic construct
  source 1..10: mol_type = other RNA
gcagtccctt

SEQ ID NO: 540 - RNA, 10 nt, synthetic construct
  source 1..10: mol_type = other RNA
gctcaccctt

SEQ ID NO: 541 - RNA, 10 nt, synthetic construct
  source 1..10: mol_type = other RNA
gctcgccctt

SEQ ID NO: 542 - RNA, 10 nt, synthetic construct
  source 1..10: mol_type = other RNA
gctctccctt

SEQ ID NO: 543 - RNA, 11 nt, synthetic construct
  source 1..11: mol_type = other RNA
cgcagcccctt

SEQ ID NO: 544 - RNA, 11 nt, synthetic construct
  source 1..11: mol_type = other RNA
cgcagtccctt

SEQ ID NO: 545 - RNA, 11 nt, synthetic construct
  source 1..11: mol_type = other RNA
cgctcaccctt

SEQ ID NO: 546 - RNA, 11 nt, synthetic construct
  source 1..11: mol_type = other RNA
cgctcgccctt

SEQ ID NO: 547 - RNA, 11 nt, synthetic construct
  source 1..11: mol_type = other RNA
cgctctccctt

SEQ ID NO: 548 - RNA, 12 nt, synthetic construct
  source 1..12: mol_type = other RNA
acgcagcccctt

SEQ ID NO: 549 - RNA, 12 nt, synthetic construct
  source 1..12: mol_type = other RNA
acgcagtccctt

SEQ ID NO: 550 - RNA, 12 nt, synthetic construct
  source 1..12: mol_type = other RNA
acgctcaccctt

SEQ ID NO: 551 - RNA, 12 nt, synthetic construct
  source 1..12: mol_type = other RNA
acgctcgccctt

SEQ ID NO: 552 - RNA, 12 nt, synthetic construct
  source 1..12: mol_type = other RNA
acgctctccctt

SEQ ID NO: 553 - RNA, 13 nt, synthetic construct
  source 1..13: mol_type = other RNA
tacgcagcccctt

SEQ ID NO: 554 - RNA, 13 nt, synthetic construct
  source 1..13: mol_type = other RNA
tacgcagtccctt

SEQ ID NO: 555 - RNA, 13 nt, synthetic construct
  source 1..13: mol_type = other RNA
tacgctcaccctt

SEQ ID NO: 556 - RNA, 13 nt, synthetic construct
  source 1..13: mol_type = other RNA
tacgctcgccctt

SEQ ID NO: 557 - RNA, 13 nt, synthetic construct
  source 1..13: mol_type = other RNA
tacgctctccctt

SEQ ID NO: 558 - RNA, 14 nt, synthetic construct
  source 1..14: mol_type = other RNA
gtacgcagcccctt

SEQ ID NO: 559 - RNA, 14 nt, synthetic construct
  source 1..14: mol_type = other RNA
gtacgcagtccctt

SEQ ID NO: 560 - RNA, 14 nt, synthetic construct
  source 1..14: mol_type = other RNA
gtacgctcaccctt

SEQ ID NO: 561 - RNA, 14 nt, synthetic construct
  source 1..14: mol_type = other RNA
gtacgctcgccctt

SEQ ID NO: 562 - RNA, 14 nt, synthetic construct
  source 1..14: mol_type = other RNA
gtacgctctccctt

SEQ ID NO: 563 - RNA, 15 nt, synthetic construct
  source 1..15: mol_type = other RNA
ggtacgcagcccctt

SEQ ID NO: 564 - RNA, 15 nt, synthetic construct
  source 1..15: mol_type = other RNA
ggtacgcagtccctt

SEQ ID NO: 565 - RNA, 15 nt, synthetic construct
  source 1..15: mol_type = other RNA
ggtacgctcaccctt

SEQ ID NO: 566 - RNA, 15 nt, synthetic construct
  source 1..15: mol_type = other RNA
ggtacgctcgccctt

SEQ ID NO: 567 - RNA, 15 nt, synthetic construct
  source 1..15: mol_type = other RNA
ggtacgctctccctt

SEQ ID NO: 568 - RNA, 16 nt, synthetic construct
  source 1..16: mol_type = other RNA
tggtacgcagcccctt

SEQ ID NO: 569 - RNA, 16 nt, synthetic construct
  source 1..16: mol_type = other RNA
tggtacgcagtccctt

SEQ ID NO: 570 - RNA, 16 nt, synthetic construct
  source 1..16: mol_type = other RNA
tggtacgctcaccctt

SEQ ID NO: 571 - RNA, 16 nt, synthetic construct
  source 1..16: mol_type = other RNA
tggtacgctcgccctt

SEQ ID NO: 572 - RNA, 16 nt, synthetic construct
  source 1..16: mol_type = other RNA
tggtacgctctccctt

SEQ ID NO: 573 - RNA, 17 nt, synthetic construct
  source 1..17: mol_type = other RNA
gtggtacgcagcccctt

SEQ ID NO: 574 - RNA, 17 nt, synthetic construct
  source 1..17: mol_type = other RNA
gtggtacgcagtccctt

SEQ ID NO: 575 - RNA, 17 nt, synthetic construct
  source 1..17: mol_type = other RNA
gtggtacgctcaccctt

SEQ ID NO: 576 - RNA, 17 nt, synthetic construct
  source 1..17: mol_type = other RNA
gtggtacgctcgccctt

SEQ ID NO: 577 - RNA, 17 nt, synthetic construct
  source 1..17: mol_type = other RNA
gtggtacgctctccctt

SEQ ID NO: 578 - RNA, 18 nt, synthetic construct
  source 1..18: mol_type = other RNA
tgtggtacgcagcccctt

SEQ ID NO: 579 - RNA, 18 nt, synthetic construct
  source 1..18: mol_type = other RNA
tgtggtacgcagtccctt

SEQ ID NO: 580 - RNA, 18 nt, synthetic construct
  source 1..18: mol_type = other RNA
tgtggtacgctcaccctt

SEQ ID NO: 581 - RNA, 18 nt, synthetic construct
  source 1..18: mol_type = other RNA
tgtggtacgctcgccctt

SEQ ID NO: 582 - RNA, 18 nt, synthetic construct
  source 1..18: mol_type = other RNA
tgtggtacgctctccctt

SEQ ID NO: 583 - RNA, 19 nt, synthetic construct
  source 1..19: mol_type = other RNA
gtgtggtacgcagcccctt

SEQ ID NO: 584 - RNA, 19 nt, synthetic construct
  source 1..19: mol_type = other RNA
gtgtggtacgcagtccctt

SEQ ID NO: 585 - RNA, 19 nt, synthetic construct
  source 1..19: mol_type = other RNA
gtgtggtacgctcaccctt

SEQ ID NO: 586 - RNA, 19 nt, synthetic construct
  source 1..19: mol_type = other RNA
gtgtggtacgctcgccctt

SEQ ID NO: 587 - RNA, 19 nt, synthetic construct
  source 1..19: mol_type = other RNA
gtgtggtacgctctccctt

SEQ ID NO: 588 - RNA, 20 nt, synthetic construct
  source 1..20: mol_type = other RNA
ggtgtggtacgcagcccctt

SEQ ID NO: 589 - RNA, 20 nt, synthetic construct
  source 1..20: mol_type = other RNA
ggtgtggtacgcagtccctt

SEQ ID NO: 590 - RNA, 20 nt, synthetic construct
  source 1..20: mol_type = other RNA
ggtgtggtacgctcaccctt

SEQ ID NO: 591 - RNA, 20 nt, synthetic construct
  source 1..20: mol_type = other RNA
ggtgtggtacgctcgccctt

SEQ ID NO: 592 - RNA, 20 nt, synthetic construct
  source 1..20: mol_type = other RNA
ggtgtggtacgctctccctt

SEQ ID NO: 593 - RNA, 21 nt, synthetic construct
  source 1..21: mol_type = other RNA
gggtgtggtacgcagcccctt

SEQ ID NO: 594 - RNA, 21 nt, synthetic construct
  source 1..21: mol_type = other RNA
gggtgtggtacgcagtccctt

SEQ ID NO: 595 - RNA, 21 nt, synthetic construct
  source 1..21: mol_type = other RNA
gggtgtggtacgctcaccctt

SEQ ID NO: 596 - RNA, 21 nt, synthetic construct
  source 1..21: mol_type = other RNA
gggtgtggtacgctcgccctt

SEQ ID NO: 597 - RNA, 21 nt, synthetic construct
  source 1..21: mol_type = other RNA
gggtgtggtacgctctccctt

SEQ ID NO: 598 - RNA, 22 nt, synthetic construct
  source 1..22: mol_type = other RNA
cgggtgtggtacgcagcccctt

SEQ ID NO: 599 - RNA, 22 nt, synthetic construct
  source 1..22: mol_type = other RNA
cgggtgtggtacgcagtccctt

SEQ ID NO: 600 - RNA, 22 nt, synthetic construct
  source 1..22: mol_type = other RNA
cgggtgtggtacgctcaccctt

SEQ ID NO: 601 - RNA, 22 nt, synthetic construct
  source 1..22: mol_type = other RNA
cgggtgtggtacgctcgccctt

SEQ ID NO: 602 - RNA, 22 nt, synthetic construct
  source 1..22: mol_type = other RNA
cgggtgtggtacgctctccctt

SEQ ID NO: 603 - RNA, 23 nt, synthetic construct
  source 1..23: mol_type = other RNA
acgggtgtggtacgcagcccctt

SEQ ID NO: 604 - RNA, 23 nt, synthetic construct
  source 1..23: mol_type = other RNA
acgggtgtggtacgcagtccctt

SEQ ID NO: 605 - RNA, 23 nt, synthetic construct
  source 1..23: mol_type = other RNA
acgggtgtggtacgctcaccctt

SEQ ID NO: 606 - RNA, 23 nt, synthetic construct
  source 1..23: mol_type = other RNA
acgggtgtggtacgctcgccctt

SEQ ID NO: 607 - RNA, 23 nt, synthetic construct
  source 1..23: mol_type = other RNA
acgggtgtggtacgctctccctt

SEQ ID NO: 608 - RNA, 24 nt, synthetic construct
  source 1..24: mol_type = other RNA
gacgggtgtggtacgcagcccctt

SEQ ID NO: 609 - RNA, 24 nt, synthetic construct
  source 1..24: mol_type = other RNA
gacgggtgtggtacgcagtccctt

SEQ ID NO: 610 - RNA, 24 nt, synthetic construct
  source 1..24: mol_type = other RNA
gacgggtgtggtacgctcaccctt

SEQ ID NO: 611 - RNA, 24 nt, synthetic construct
  source 1..24: mol_type = other RNA
gacgggtgtggtacgctcgccctt

SEQ ID NO: 612 - RNA, 24 nt, synthetic construct
  source 1..24: mol_type = other RNA
gacgggtgtggtacgctctccctt

SEQ ID NO: 613 - RNA, 25 nt, synthetic construct
  source 1..25: mol_type = other RNA
cgacgggtgtggtacgcagcccctt

SEQ ID NO: 614 - RNA, 25 nt, synthetic construct
  source 1..25: mol_type = other RNA
cgacgggtgtggtacgcagtccctt

SEQ ID NO: 615 - RNA, 25 nt, synthetic construct
  source 1..25: mol_type = other RNA
cgacgggtgtggtacgctcaccctt

SEQ ID NO: 616 - RNA, 25 nt, synthetic construct
  source 1..25: mol_type = other RNA
cgacgggtgtggtacgctcgccctt

SEQ ID NO: 617 - RNA, 25 nt, synthetic construct
  source 1..25: mol_type = other RNA
cgacgggtgtggtacgctctccctt

SEQ ID NO: 618 - RNA, 26 nt, synthetic construct
  source 1..26: mol_type = other RNA
gcgacgggtgtggtacgcagcccctt

SEQ ID NO: 619 - RNA, 26 nt, synthetic construct
  source 1..26: mol_type = other RNA
gcgacgggtgtggtacgcagtccctt

SEQ ID NO: 620 - RNA, 26 nt, synthetic construct
  source 1..26: mol_type = other RNA
gcgacgggtgtggtacgctcaccctt

SEQ ID NO: 621 - RNA, 26 nt, synthetic construct
  source 1..26: mol_type = other RNA
gcgacgggtgtggtacgctcgccctt

SEQ ID NO: 622 - RNA, 26 nt, synthetic construct
  source 1..26: mol_type = other RNA
gcgacgggtgtggtacgctctccctt

SEQ ID NO: 623 - RNA, 27 nt, synthetic construct
  source 1..27: mol_type = other RNA
tgcgacgggtgtggtacgcagcccctt

SEQ ID NO: 624 - RNA, 27 nt, synthetic construct
  source 1..27: mol_type = other RNA
tgcgacgggtgtggtacgcagtccctt

SEQ ID NO: 625 - RNA, 27 nt, synthetic construct
  source 1..27: mol_type = other RNA
tgcgacgggtgtggtacgctcaccctt

SEQ ID NO: 626 - RNA, 27 nt, synthetic construct
  source 1..27: mol_type = other RNA
tgcgacgggtgtggtacgctcgccctt

SEQ ID NO: 627 - RNA, 27 nt, synthetic construct
  source 1..27: mol_type = other RNA
tgcgacgggtgtggtacgctctccctt

SEQ ID NO: 628 - RNA, 28 nt, synthetic construct
  source 1..28: mol_type = other RNA
atgcgacgggtgtggtacgcagcccctt

SEQ ID NO: 629 - RNA, 28 nt, synthetic construct
  source 1..28: mol_type = other RNA
atgcgacgggtgtggtacgcagtccctt

SEQ ID NO: 630 - RNA, 28 nt, synthetic construct
  source 1..28: mol_type = other RNA
atgcgacgggtgtggtacgctcaccctt

SEQ ID NO: 631 - RNA, 28 nt, synthetic construct
  source 1..28: mol_type = other RNA
atgcgacgggtgtggtacgctcgccctt

SEQ ID NO: 632 - RNA, 28 nt, synthetic construct
  source 1..28: mol_type = other RNA
atgcgacgggtgtggtacgctctccctt

SEQ ID NO: 633 - RNA, 29 nt, synthetic construct
  source 1..29: mol_type = other RNA
aatgcgacgggtgtggtacgcagcccctt

SEQ ID NO: 634 - RNA, 29 nt, synthetic construct
  source 1..29: mol_type = other RNA
aatgcgacgggtgtggtacgcagtccctt

SEQ ID NO: 635 - RNA, 29 nt, synthetic construct
  source 1..29: mol_type = other RNA
aatgcgacgggtgtggtacgctcaccctt

SEQ ID NO: 636 - RNA, 29 nt, synthetic construct
  source 1..29: mol_type = other RNA
aatgcgacgggtgtggtacgctcgccctt

SEQ ID NO: 637 - RNA, 29 nt, synthetic construct
  source 1..29: mol_type = other RNA
aatgcgacgggtgtggtacgctctccctt

SEQ ID NO: 638 - RNA, 30 nt, synthetic construct
  source 1..30: mol_type = other RNA
caatgcgacgggtgtggtacgcagcccctt

SEQ ID NO: 639 - RNA, 30 nt, synthetic construct
  source 1..30: mol_type = other RNA
caatgcgacgggtgtggtacgcagtccctt

SEQ ID NO: 640 - RNA, 30 nt, synthetic construct
  source 1..30: mol_type = other RNA
caatgcgacgggtgtggtacgctcaccctt

SEQ ID NO: 641 - RNA, 30 nt, synthetic construct
  source 1..30: mol_type = other RNA
caatgcgacgggtgtggtacgctcgccctt

SEQ ID NO: 642 - RNA, 30 nt, synthetic construct
  source 1..30: mol_type = other RNA
caatgcgacgggtgtggtacgctctccctt

SEQ ID NO: 643 - RNA, 31 nt, synthetic construct
  source 1..31: mol_type = other RNA
ccaatgcgacgggtgtggtacgcagcccctt

SEQ ID NO: 644 - RNA, 31 nt, synthetic construct
  source 1..31: mol_type = other RNA
ccaatgcgacgggtgtggtacgcagtccctt

SEQ ID NO: 645 - RNA, 31 nt, synthetic construct
  source 1..31: mol_type = other RNA
ccaatgcgacgggtgtggtacgctcaccctt

SEQ ID NO: 646 - RNA, 31 nt, synthetic construct
  source 1..31: mol_type = other RNA
ccaatgcgacgggtgtggtacgctcgccctt

SEQ ID NO: 647 - RNA, 31 nt, synthetic construct
  source 1..31: mol_type = other RNA
ccaatgcgacgggtgtggtacgctctccctt

SEQ ID NO: 648 - RNA, 32 nt, synthetic construct
  source 1..32: mol_type = other RNA
tccaatgcgacgggtgtggtacgcagcccctt

SEQ ID NO: 649 - RNA, 32 nt, synthetic construct
  source 1..32: mol_type = other RNA
tccaatgcgacgggtgtggtacgcagtccctt

SEQ ID NO: 650 - RNA, 32 nt, synthetic construct
  source 1..32: mol_type = other RNA
tccaatgcgacgggtgtggtacgctcaccctt

SEQ ID NO: 651 - RNA, 32 nt, synthetic construct
  source 1..32: mol_type = other RNA
tccaatgcgacgggtgtggtacgctcgccctt

SEQ ID NO: 652 - RNA, 32 nt, synthetic construct
  source 1..32: mol_type = other RNA
tccaatgcgacgggtgtggtacgctctccctt

SEQ ID NO: 653 - RNA, 33 nt, synthetic construct
  source 1..33: mol_type = other RNA
ctccaatgcgacgggtgtggtacgcagcccctt

SEQ ID NO: 654 - RNA, 33 nt, synthetic construct
  source 1..33: mol_type = other RNA
ctccaatgcgacgggtgtggtacgcagtccctt

SEQ ID NO: 655 - RNA, 33 nt, synthetic construct
  source 1..33: mol_type = other RNA
ctccaatgcgacgggtgtggtacgctcaccctt

SEQ ID NO: 656 - RNA, 33 nt, synthetic construct
  source 1..33: mol_type = other RNA
ctccaatgcgacgggtgtggtacgctcgccctt

SEQ ID NO: 657 - RNA, 33 nt, synthetic construct
  source 1..33: mol_type = other RNA
ctccaatgcgacgggtgtggtacgctctccctt

SEQ ID NO: 658 - RNA, 34 nt, synthetic construct
  source 1..34: mol_type = other RNA
tctccaatgcgacgggtgtggtacgcagcccctt

SEQ ID NO: 659 - RNA, 34 nt, synthetic construct
  source 1..34: mol_type = other RNA
tctccaatgcgacgggtgtggtacgcagtccctt

SEQ ID NO: 660 - RNA, 34 nt, synthetic construct
  source 1..34: mol_type = other RNA
tctccaatgcgacgggtgtggtacgctcaccctt

SEQ ID NO: 661 - RNA, 34 nt, synthetic construct
  source 1..34: mol_type = other RNA
tctccaatgcgacgggtgtggtacgctcgccctt

SEQ ID NO: 662 - RNA, 34 nt, synthetic construct
  source 1..34: mol_type = other RNA
tctccaatgcgacgggtgtggtacgctctccctt

SEQ ID NO: 663 - RNA, 35 nt, synthetic construct
  source 1..35: mol_type = other RNA
ttctccaatgcgacgggtgtggtacgcagcccctt

SEQ ID NO: 664 - RNA, 35 nt, synthetic construct
  source 1..35: mol_type = other RNA
ttctccaatgcgacgggtgtggtacgcagtccctt

SEQ ID NO: 665 - RNA, 35 nt, synthetic construct
  source 1..35: mol_type = other RNA
ttctccaatgcgacgggtgtggtacgctcaccctt

SEQ ID NO: 666 - RNA, 35 nt, synthetic construct
  source 1..35: mol_type = other RNA
ttctccaatgcgacgggtgtggtacgctcgccctt

SEQ ID NO: 667 - RNA, 35 nt, synthetic construct
  source 1..35: mol_type = other RNA
ttctccaatgcgacgggtgtggtacgctctccctt

SEQ ID NO: 668 - RNA, 36 nt, synthetic construct
  source 1..36: mol_type = other RNA
cttctccaatgcgacgggtgtggtacgcagcccctt

SEQ ID NO: 669 - RNA, 36 nt, synthetic construct
  source 1..36: mol_type = other RNA
cttctccaatgcgacgggtgtggtacgcagtccctt

SEQ ID NO: 670 - RNA, 36 nt, synthetic construct
  source 1..36: mol_type = other RNA
cttctccaatgcgacgggtgtggtacgctcaccctt

SEQ ID NO: 671 - RNA, 36 nt, synthetic construct
  source 1..36: mol_type = other RNA
cttctccaatgcgacgggtgtggtacgctcgccctt

SEQ ID NO: 672 - RNA, 36 nt, synthetic construct
  source 1..36: mol_type = other RNA
cttctccaatgcgacgggtgtggtacgctctccctt

SEQ ID NO: 673 - RNA, 37 nt, synthetic construct
  source 1..37: mol_type = other RNA
ccttctccaatgcgacgggtgtggtacgcagcccctt

SEQ ID NO: 674 - RNA, 37 nt, synthetic construct
  source 1..37: mol_type = other RNA
ccttctccaatgcgacgggtgtggtacgcagtccctt

SEQ ID NO: 675 - RNA, 37 nt, synthetic construct
  source 1..37: mol_type = other RNA
ccttctccaatgcgacgggtgtggtacgctcaccctt

SEQ ID NO: 676 - RNA, 37 nt, synthetic construct
  source 1..37: mol_type = other RNA
ccttctccaatgcgacgggtgtggtacgctcgccctt

SEQ ID NO: 677 - RNA, 37 nt, synthetic construct
  source 1..37: mol_type = other RNA
ccttctccaatgcgacgggtgtggtacgctctccctt

SEQ ID NO: 678 - RNA, 38 nt, synthetic construct
  source 1..38: mol_type = other RNA
cccttctccaatgcgacgggtgtggtacgcagcccctt

SEQ ID NO: 679 - RNA, 38 nt, synthetic construct
  source 1..38: mol_type = other RNA
cccttctccaatgcgacgggtgtggtacgcagtccctt

SEQ ID NO: 680 - RNA, 38 nt, synthetic construct
  source 1..38: mol_type = other RNA
cccttctccaatgcgacgggtgtggtacgctcaccctt

SEQ ID NO: 681 - RNA, 38 nt, synthetic construct
  source 1..38: mol_type = other RNA
cccttctccaatgcgacgggtgtggtacgctcgccctt

SEQ ID NO: 682 - RNA, 38 nt, synthetic construct
  source 1..38: mol_type = other RNA
cccttctccaatgcgacgggtgtggtacgctctccctt

SEQ ID NO: 683 - RNA, 39 nt, synthetic construct
  source 1..39: mol_type = other RNA
gcccttctccaatgcgacgggtgtggtacgcagcccctt

SEQ ID NO: 684 - RNA, 39 nt, synthetic construct
  source 1..39: mol_type = other RNA
gcccttctccaatgcgacgggtgtggtacgcagtccctt

SEQ ID NO: 685 - RNA, 39 nt, synthetic construct
  source 1..39: mol_type = other RNA
gcccttctccaatgcgacgggtgtggtacgctcaccctt

SEQ ID NO: 686 - RNA, 39 nt, synthetic construct
  source 1..39: mol_type = other RNA
gcccttctccaatgcgacgggtgtggtacgctcgccctt

SEQ ID NO: 687 - RNA, 39 nt, synthetic construct
  source 1..39: mol_type = other RNA
gcccttctccaatgcgacgggtgtggtacgctctccctt

SEQ ID NO: 688 - RNA, 40 nt, synthetic construct
  source 1..40: mol_type = other RNA
tgcccttctccaatgcgacgggtgtggtacgcagcccctt

SEQ ID NO: 689 - RNA, 40 nt, synthetic construct
  source 1..40: mol_type = other RNA
tgcccttctccaatgcgacgggtgtggtacgcagtccctt

SEQ ID NO: 690 - RNA, 40 nt, synthetic construct
  source 1..40: mol_type = other RNA
tgcccttctccaatgcgacgggtgtggtacgctcaccctt

SEQ ID NO: 691 - RNA, 40 nt, synthetic construct
  source 1..40: mol_type = other RNA
tgcccttctccaatgcgacgggtgtggtacgctcgccctt

SEQ ID NO: 692 - RNA, 40 nt, synthetic construct
  source 1..40: mol_type = other RNA
tgcccttctccaatgcgacgggtgtggtacgctctccctt

SEQ ID NO: 693 - RNA, 20 nt, synthetic construct
  source 1..20: mol_type = other RNA
caggccttcgcagcattctt

SEQ ID NO: 694 - RNA, 20 nt, synthetic construct
  source 1..20: mol_type = other RNA
ccttcgcagcattcttgggt

SEQ ID NO: 695 - RNA, 20 nt, synthetic construct
  source 1..20: mol_type = other RNA
gccttcgcagcattcttggg

SEQ ID NO: 696 - RNA, 20 nt, synthetic construct
  source 1..20: mol_type = other RNA
tcaggccttcgcagcattct

SEQ ID NO: 697 - RNA, 114 nt, synthetic construct
  source 1..114: mol_type = other RNA
agtactgtgggtactcgaaggttttagagctagaaatagcaagttaaaataaggctagtccgttatcaacttgaaaaagtggcaccgagtcggtgcgcagccccttcgagtacc

SEQ ID NO: 698 - RNA, 116 nt, synthetic construct
  source 1..116: mol_type = other RNA
agtactgtgggtactcgaaggttttagagctagaaatagcaagttaaaataaggctagtccgttatcaacttgaaaaagtggcaccgagtcggtgcacgcagccccttcgagtacc

SEQ ID NO: 699 - RNA, 116 nt, synthetic construct
  source 1..116: mol_type = other RNA
agtactgtgggtactcgaaggttttagagctagaaatagcaagttaaaataaggctagtccgttatcaacttgaaaaagtggcaccgagtcggtgcgcagccccttcgagtaccca

SEQ ID NO: 700 - RNA, 118 nt, synthetic construct
  source 1..118: mol_type = other RNA
agtactgtgggtactcgaaggttttagagctagaaatagcaagttaaaataaggctagtccgttatcaacttgaaaaagtggcaccgagtcggtgcgcagccccttcgagtacctttt

SEQ ID NO: 701 - RNA, 118 nt, synthetic construct
  source 1..118: mol_type = other RNA
agtactgtgggtactcgaaggttttagagctagaaatagcaagttaaaataaggctagtccgttatcaacttgaaaaagtggcaccgagtcggtgcgtacgcagccccttcgagtacc

SEQ ID NO: 702 - RNA, 118 nt, synthetic construct
  source 1..118: mol_type = other RNA
agtactgtgggtactcgaaggttttagagctagaaatagcaagttaaaataaggctagtccgttatcaacttgaaaaagtggcaccgagtcggtgcacgcagccccttcgagtaccca

SEQ ID NO: 703 - RNA, 118 nt, synthetic construct
  source 1..118: mol_type = other RNA
agtactgtgggtactcgaaggttttagagctagaaatagcaagttaaaataaggctagtccgttatcaacttgaaaaagtggcaccgagtcggtgcgcagccccttcgagtacccaca

SEQ ID NO: 704 - RNA, 120 nt, synthetic construct
  source 1..120: mol_type = other RNA
agtactgtgggtactcgaaggttttagagctagaaatagcaagttaaaataaggctagtccgttatcaacttgaaaaagtggcaccgagtcggtgcacgcagccccttcgagtacctttt

SEQ ID NO: 705 - RNA, 120 nt, synthetic construct
  source 1..120: mol_type = other RNA
agtactgtgggtactcgaaggttttagagctagaaatagcaagttaaaataaggctagtccgttatcaacttgaaaaagtggcaccgagtcggtgcgcagccccttcgagtacccatttt

SEQ ID NO: 706 - RNA, 120 nt, synthetic construct
  source 1..120: mol_type = other RNA
agtactgtgggtactcgaaggttttagagctagaaatagcaagttaaaataaggctagtccgttatcaacttgaaaaagtggcaccgagtcggtgctggtacgcagccccttcgagtacc

SEQ ID NO: 707 - RNA, 120 nt, synthetic construct
  source 1..120: mol_type = other RNA
agtactgtgggtactcgaaggttttagagctagaaatagcaagttaaaataaggctagtccgttatcaacttgaaaaagtggcaccgagtcggtgcgtacgcagccccttcgagtaccca

SEQ ID NO: 708 - RNA, 120 nt, synthetic construct
  source 1..120: mol_type = other RNA
agtactgtgggtactcgaaggttttagagctagaaatagcaagttaaaataaggctagtccgttatcaacttgaaaaagtggcaccgagtcggtgcacgcagccccttcgagtacccaca

SEQ ID NO: 709 - RNA, 120 nt, synthetic construct
  source 1..120: mol_type = other RNA
agtactgtgggtactcgaaggttttagagctagaaatagcaagttaaaataaggctagtccgttatcaacttgaaaaagtggcaccgagtcggtgcgcagccccttcgagtacccacagt

SEQ ID NO: 710 - RNA, 122 nt, synthetic construct
  source 1..122: mol_type = other RNA
agtactgtgggtactcgaaggttttagagctagaaatagcaagttaaaataaggctagtccgttatcaacttgaaaaagtggcaccgagtcggtgcgtacgcagccccttcgagtacctttt

SEQ ID NO: 711 - RNA, 122 nt, synthetic construct
  source 1..122: mol_type = other RNA
agtactgtgggtactcgaaggttttagagctagaaatagcaagttaaaataaggctagtccgttatcaacttgaaaaagtggcaccgagtcggtgcacgcagccccttcgagtacccatttt

SEQ ID NO: 712 - RNA, 122 nt, synthetic construct
  source 1..122: mol_type = other RNA
agtactgtgggtactcgaaggttttagagctagaaatagcaagttaaaataaggctagtccgttatcaacttgaaaaagtggcaccgagtcggtgcgcagccccttcgagtacccacatttt

SEQ ID NO: 713 - RNA, 122 nt, synthetic construct
  source 1..122: mol_type = other RNA
agtactgtgggtactcgaaggttttagagctagaaatagcaagttaaaataaggctagtccgttatcaacttgaaaaagtggcaccgagtcggtgctggtacgcagccccttcgagtaccca

SEQ ID NO: 714 - RNA, 122 nt, synthetic construct
  source 1..122: mol_type = other RNA
agtactgtgggtactcgaaggttttagagctagaaatagcaagttaaaataaggctagtccgttatcaacttgaaaaagtggcaccgagtcggtgcgtacgcagccccttcgagtacccaca

SEQ ID NO: 715 - RNA, 122 nt, synthetic construct
  source 1..122: mol_type = other RNA
agtactgtgggtactcgaaggttttagagctagaaatagcaagttaaaataaggctagtccgttatcaacttgaaaaagtggcaccgagtcggtgcacgcagccccttcgagtacccacagt

SEQ ID NO: 716 - RNA, 124 nt, synthetic construct
  source 1..124: mol_type = other RNA
agtactgtgggtactcgaaggttttagagctagaaatagcaagttaaaataaggctagtccgttatcaacttgaaaaagtggcaccgagtcggtgctggtacgcagccccttcgagtacctttt

SEQ ID NO: 717 - RNA, 124 nt, synthetic construct
  source 1..124: mol_type = other RNA
agtactgtgggtactcgaaggttttagagctagaaatagcaagttaaaataaggctagtccgttatcaacttgaaaaagtggcaccgagtcggtgcgtacgcagccccttcgagtacccatttt

SEQ ID NO: 718 - RNA, 124 nt, synthetic construct
  source 1..124: mol_type = other RNA
agtactgtgggtactcgaaggttttagagctagaaatagcaagttaaaataaggctagtccgttatcaacttgaaaaagtggcaccgagtcggtgcacgcagccccttcgagtacccacatttt

SEQ ID NO: 719 - RNA, 124 nt, synthetic construct
  source 1..124: mol_type = other RNA
agtactgtgggtactcgaaggttttagagctagaaatagcaagttaaaataaggctagtccgttatcaacttgaaaaagtggcaccgagtcggtgcgcagccccttcgagtacccacagttttt

SEQ ID NO: 720 - RNA, 124 nt, synthetic construct
  source 1..124: mol_type = other RNA
agtactgtgggtactcgaaggttttagagctagaaatagcaagttaaaataaggctagtccgttatcaacttgaaaaagtggcaccgagtcggtgctggtacgcagccccttcgagtacccaca

SEQ ID NO: 721 - RNA, 124 nt, synthetic construct
  source 1..124: mol_type = other RNA
agtactgtgggtactcgaaggttttagagctagaaatagcaagttaaaataaggctagtccgttatcaacttgaaaaagtggcaccgagtcggtgcgtacgcagccccttcgagtacccacagt

SEQ ID NO: 722 - RNA, 126 nt, synthetic construct
  source 1..126: mol_type = other RNA
agtactgtgggtactcgaaggttttagagctagaaatagcaagttaaaataaggctagtccgttatcaacttgaaaaagtggcaccgagtcggtgctggtacgcagccccttcgagtacccatttt

SEQ ID NO: 723 - RNA, 126 nt, synthetic construct
  source 1..126: mol_type = other RNA
agtactgtgggtactcgaaggttttagagctagaaatagcaagttaaaataaggctagtccgttatcaacttgaaaaagtggcaccgagtcggtgcgtacgcagccccttcgagtacccacatttt

SEQ ID NO: 724 - RNA, 126 nt, synthetic construct
  source 1..126: mol_type = other RNA
agtactgtgggtactcgaaggttttagagctagaaatagcaagttaaaataaggctagtccgttatcaacttgaaaaagtggcaccgagtcggtgcacgcagccccttcgagtacccacagttttt

SEQ ID NO: 725 - RNA, 126 nt, synthetic construct
  source 1..126: mol_type = other RNA
agtactgtgggtactcgaaggttttagagctagaaatagcaagttaaaataaggctagtccgttatcaacttgaaaaagtggcaccgagtcggtgctggtacgcagccccttcgagtacccacagt

SEQ ID NO: 726 - RNA, 128 nt, synthetic construct
  source 1..128: mol_type = other RNA
agtactgtgggtactcgaaggttttagagctagaaatagcaagttaaaataaggctagtccgttatcaacttgaaaaagtggcaccgagtcggtgctggtacgcagccccttcgagtacccacatttt

SEQ ID NO: 727 - RNA, 128 nt, synthetic construct
  source 1..128: mol_type = other RNA
agtactgtgggtactcgaaggttttagagctagaaatagcaagttaaaataaggctagtccgttatcaacttgaaaaagtggcaccgagtcggtgcgtacgcagccccttcgagtacccacagttttt

SEQ ID NO: 728 - RNA, 130 nt, synthetic construct
  source 1..130: mol_type = other RNA
agtactgtgggtactcgaaggttttagagctagaaatagcaagttaaaataaggctagtccgttatcaacttgaaaaagtggcaccgagtcggtgctggtacgcagccccttcgagtacccacagttttt

SEQ ID NO: 729 - RNA, 17 nt, synthetic construct
  source 1..17: mol_type = other RNA
ctccaatgcgacgggtg

SEQ ID NO: 730 - RNA, 18 nt, synthetic construct
  source 1..18: mol_type = other RNA
tctccaatgcgacgggtg

SEQ ID NO: 731 - RNA, 19 nt, synthetic construct
  source 1..19: mol_type = other RNA
ttctccaatgcgacgggtg

SEQ ID NO: 732 - RNA, 21 nt, synthetic construct
  source 1..21: mol_type = other RNA
ccttctccaatgcgacgggtg

SEQ ID NO: 733 - RNA, 22 nt, synthetic construct
  source 1..22: mol_type = other RNA
cccttctccaatgcgacgggtg

SEQ ID NO: 734-738 - skipped (5 entries)

SEQ ID NO: 739 - RNA, 10 nt, synthetic construct
  source 1..10: mol_type = other RNA
ccgtcgcatt

SEQ ID NO: 740 - RNA, 11 nt, synthetic construct
  source 1..11: mol_type = other RNA
ccgtcgcattg

SEQ ID NO: 741 - RNA, 12 nt, synthetic construct
  source 1..12: mol_type = other RNA
ccgtcgcattgg

SEQ ID NO: 742 - RNA, 13 nt, synthetic construct
  source 1..13: mol_type = other RNA
ccgtcgcattgga

SEQ ID NO: 743 - RNA, 14 nt, synthetic construct
  source 1..14: mol_type = other RNA
ccgtcgcattggag

SEQ ID NO: 744 - RNA, 15 nt, synthetic construct
  source 1..15: mol_type = other RNA
ccgtcgcattggaga

SEQ ID NO: 745 - RNA, 16 nt, synthetic construct
  source 1..16: mol_type = other RNA
ccgtcgcattggagaa

SEQ ID NO: 746 - RNA, 17 nt, synthetic construct
  source 1..17: mol_type = other RNA
ccgtcgcattggagaag

SEQ ID NO: 747 - RNA, 18 nt, synthetic construct
  source 1..18: mol_type = other RNA
ccgtcgcattggagaagg

SEQ ID NO: 748 - RNA, 19 nt, synthetic construct
  source 1..19: mol_type = other RNA
ccgtcgcattggagaaggg

SEQ ID NO: 749 - RNA, 16 nt, synthetic construct
  source 1..16: mol_type = other RNA
gggctgcgtacaacac

SEQ ID NO: 750 - RNA, 16 nt, synthetic construct
  source 1..16: mol_type = other RNA
gggctgcgtaccacac

SEQ ID NO: 751 - RNA, 16 nt, synthetic construct
  source 1..16: mol_type = other RNA
gggctgcgtacgacac

SEQ ID NO: 752 - RNA, 16 nt, synthetic construct
  source 1..16: mol_type = other RNA
gggctgcgtactacac

SEQ ID NO: 753 - RNA, 17 nt, synthetic construct
  source 1..17: mol_type = other RNA
ggggctgcgtacaacac

SEQ ID NO: 754 - RNA, 17 nt, synthetic construct
  source 1..17: mol_type = other RNA
ggggctgcgtaccacac

SEQ ID NO: 755 - RNA, 17 nt, synthetic construct
  source 1..17: mol_type = other RNA
ggggctgcgtacgacac

SEQ ID NO: 756 - RNA, 17 nt, synthetic construct
  source 1..17: mol_type = other RNA
ggggctgcgtactacac

SEQ ID NO: 757 - RNA, 18 nt, synthetic construct
  source 1..18: mol_type = other RNA
aggggctgcgtacaacac

SEQ ID NO: 758 - RNA, 18 nt, synthetic construct
  source 1..18: mol_type = other RNA
aggggctgcgtaccacac

SEQ ID NO: 759 - RNA, 18 nt, synthetic construct
  source 1..18: mol_type = other RNA
aggggctgcgtacgacac

SEQ ID NO: 760 - RNA, 18 nt, synthetic construct
  source 1..18: mol_type = other RNA
aggggctgcgtactacac

SEQ ID NO: 761 - RNA, 19 nt, synthetic construct
  source 1..19: mol_type = other RNA
aaggggctgcgtacaacac

SEQ ID NO: 762 - RNA, 19 nt, synthetic construct
  source 1..19: mol_type = other RNA
aaggggctgcgtaccacac

SEQ ID NO: 763 - RNA, 19 nt, synthetic construct
  source 1..19: mol_type = other RNA
aaggggctgcgtacgacac

SEQ ID NO: 764 - RNA, 19 nt, synthetic construct
  source 1..19: mol_type = other RNA
aaggggctgcgtactacac

SEQ ID NO: 765 - RNA, 20 nt, synthetic construct
  source 1..20: mol_type = other RNA
gaaggggctgcgtacaacac

SEQ ID NO: 766 - RNA, 20 nt, synthetic construct
  source 1..20: mol_type = other RNA
gaaggggctgcgtaccacac

SEQ ID NO: 767 - RNA, 20 nt, synthetic construct
  source 1..20: mol_type = other RNA
gaaggggctgcgtacgacac

SEQ ID NO: 768 - RNA, 20 nt, synthetic construct
  source 1..20: mol_type = other RNA
gaaggggctgcgtactacac

SEQ ID NO: 769 - RNA, 21 nt, synthetic construct
  source 1..21: mol_type = other RNA
cgaaggggctgcgtacaacac

SEQ ID NO: 770 - RNA, 21 nt, synthetic construct
  source 1..21: mol_type = other RNA
cgaaggggctgcgtaccacac

SEQ ID NO: 771 - RNA, 21 nt, synthetic construct
  source 1..21: mol_type = other RNA
cgaaggggctgcgtacgacac

SEQ ID NO: 772 - RNA, 21 nt, synthetic construct
  source 1..21: mol_type = other RNA
cgaaggggctgcgtactacac

SEQ ID NO: 773 - RNA, 22 nt, synthetic construct
  source 1..22: mol_type = other RNA
tcgaaggggctgcgtacaacac

SEQ ID NO: 774 - RNA, 22 nt, synthetic construct
  source 1..22: mol_type = other RNA
tcgaaggggctgcgtaccacac

SEQ ID NO: 775 - RNA, 22 nt, synthetic construct
  source 1..22: mol_type = other RNA
tcgaaggggctgcgtacgacac

SEQ ID NO: 776 - RNA, 22 nt, synthetic construct
  source 1..22: mol_type = other RNA
tcgaaggggctgcgtactacac

SEQ ID NO: 777 - RNA, 23 nt, synthetic construct
  source 1..23: mol_type = other RNA
ctcgaaggggctgcgtacaacac

SEQ ID NO: 778 - RNA, 23 nt, synthetic construct
  source 1..23: mol_type = other RNA
ctcgaaggggctgcgtaccacac

SEQ ID NO: 779 - RNA, 23 nt, synthetic construct
  source 1..23: mol_type = other RNA
ctcgaaggggctgcgtacgacac

SEQ ID NO: 780 - RNA, 23 nt, synthetic construct
  source 1..23: mol_type = other RNA
ctcgaaggggctgcgtactacac

SEQ ID NO: 781 - RNA, 24 nt, synthetic construct
  source 1..24: mol_type = other RNA
actcgaaggggctgcgtacaacac

SEQ ID NO: 782 - RNA, 24 nt, synthetic construct
  source 1..24: mol_type = other RNA
actcgaaggggctgcgtaccacac

SEQ ID NO: 783 - RNA, 24 nt, synthetic construct
  source 1..24: mol_type = other RNA
actcgaaggggctgcgtacgacac

SEQ ID NO: 784 - RNA, 24 nt, synthetic construct
  source 1..24: mol_type = other RNA
actcgaaggggctgcgtactacac

SEQ ID NO: 785 - RNA, 25 nt, synthetic construct
  source 1..25: mol_type = other RNA
tactcgaaggggctgcgtacaacac

SEQ ID NO: 786 - RNA, 25 nt, synthetic construct
  source 1..25: mol_type = other RNA
tactcgaaggggctgcgtaccacac

SEQ ID NO: 787 - RNA, 25 nt, synthetic construct
  source 1..25: mol_type = other RNA
tactcgaaggggctgcgtacgacac

SEQ ID NO: 788 - RNA, 25 nt, synthetic construct
  source 1..25: mol_type = other RNA
tactcgaaggggctgcgtactacac

SEQ ID NO: 789 - RNA, 26 nt, synthetic construct
  source 1..26: mol_type = other RNA
gtactcgaaggggctgcgtacaacac

SEQ ID NO: 790 - RNA, 26 nt, synthetic construct
  source 1..26: mol_type = other RNA
gtactcgaaggggctgcgtaccacac

SEQ ID NO: 791 - RNA, 26 nt, synthetic construct
  source 1..26: mol_type = other RNA
gtactcgaaggggctgcgtacgacac

SEQ ID NO: 792 - RNA, 26 nt, synthetic construct
  source 1..26: mol_type = other RNA
gtactcgaaggggctgcgtactacac

SEQ ID NO: 793 - RNA, 27 nt, synthetic construct
  source 1..27: mol_type = other RNA
ggtactcgaaggggctgcgtacaacac

SEQ ID NO: 794 - RNA, 27 nt, synthetic construct
  source 1..27: mol_type = other RNA
ggtactcgaaggggctgcgtaccacac

SEQ ID NO: 795 - RNA, 27 nt, synthetic construct
  source 1..27: mol_type = other RNA
ggtactcgaaggggctgcgtacgacac

SEQ ID NO: 796 - RNA, 27 nt, synthetic construct
  source 1..27: mol_type = other RNA
ggtactcgaaggggctgcgtactacac

SEQ ID NO: 797 - RNA, 28 nt, synthetic construct
  source 1..28: mol_type = other RNA
gggtactcgaaggggctgcgtacaacac

SEQ ID NO: 798 - RNA, 28 nt, synthetic construct
  source 1..28: mol_type = other RNA
gggtactcgaaggggctgcgtaccacac

SEQ ID NO: 799 - RNA, 28 nt, synthetic construct
  source 1..28: mol_type = other RNA
gggtactcgaaggggctgcgtacgacac

SEQ ID NO: 800 - RNA, 28 nt, synthetic construct
  source 1..28: mol_type = other RNA
gggtactcgaaggggctgcgtactacac

SEQ ID NO: 801 - RNA, 29 nt, synthetic construct
  source 1..29: mol_type = other RNA
tgggtactcgaaggggctgcgtacaacac

SEQ ID NO: 802 - RNA, 29 nt, synthetic construct
  source 1..29: mol_type = other RNA
tgggtactcgaaggggctgcgtaccacac

SEQ ID NO: 803 - RNA, 29 nt, synthetic construct
  source 1..29: mol_type = other RNA
tgggtactcgaaggggctgcgtacgacac

SEQ ID NO: 804 - RNA, 29 nt, synthetic construct
  source 1..29: mol_type = other RNA
tgggtactcgaaggggctgcgtactacac

SEQ ID NO: 805 - RNA, 30 nt, synthetic construct
  source 1..30: mol_type = other RNA
gtgggtactcgaaggggctgcgtacaacac

SEQ ID NO: 806 - RNA, 30 nt, synthetic construct
  source 1..30: mol_type = other RNA
gtgggtactcgaaggggctgcgtaccacac

SEQ ID NO: 807 - RNA, 30 nt, synthetic construct
  source 1..30: mol_type = other RNA
gtgggtactcgaaggggctgcgtacgacac

SEQ ID NO: 808 - RNA, 30 nt, synthetic construct
  source 1..30: mol_type = other RNA
gtgggtactcgaaggggctgcgtactacac

SEQ ID NO: 809 - RNA, 31 nt, synthetic construct
  source 1..31: mol_type = other RNA
tgtgggtactcgaaggggctgcgtacaacac

SEQ ID NO: 810 - RNA, 31 nt, synthetic construct
  source 1..31: mol_type = other RNA
tgtgggtactcgaaggggctgcgtaccacac

SEQ ID NO: 811 - RNA, 31 nt, synthetic construct
  source 1..31: mol_type = other RNA
tgtgggtactcgaaggggctgcgtacgacac

SEQ ID NO: 812 - RNA, 31 nt, synthetic construct
  source 1..31: mol_type = other RNA
tgtgggtactcgaaggggctgcgtactacac

SEQ ID NO: 813 - RNA, 32 nt, synthetic construct
  source 1..32: mol_type = other RNA
ctgtgggtactcgaaggggctgcgtacaacac

SEQ ID NO: 814 - RNA, 32 nt, synthetic construct
  source 1..32: mol_type = other RNA
ctgtgggtactcgaaggggctgcgtaccacac

SEQ ID NO: 815 - RNA, 32 nt, synthetic construct
  source 1..32: mol_type = other RNA
ctgtgggtactcgaaggggctgcgtacgacac

SEQ ID NO: 816 - RNA, 32 nt, synthetic construct
  source 1..32: mol_type = other RNA
ctgtgggtactcgaaggggctgcgtactacac

SEQ ID NO: 817 - RNA, 33 nt, synthetic construct
  source 1..33: mol_type = other RNA
actgtgggtactcgaaggggctgcgtacaacac

SEQ ID NO: 818 - RNA, 33 nt, synthetic construct
  source 1..33: mol_type = other RNA
actgtgggtactcgaaggggctgcgtaccacac

SEQ ID NO: 819 - RNA, 33 nt, synthetic construct
  source 1..33: mol_type = other RNA
actgtgggtactcgaaggggctgcgtacgacac

SEQ ID NO: 820 - RNA, 33 nt, synthetic construct
  source 1..33: mol_type = other RNA
actgtgggtactcgaaggggctgcgtactacac

SEQ ID NO: 821 - RNA, 34 nt, synthetic construct
  source 1..34: mol_type = other RNA
tactgtgggtactcgaaggggctgcgtacaacac

SEQ ID NO: 822 - RNA, 34 nt, synthetic construct
  source 1..34: mol_type = other RNA
tactgtgggtactcgaaggggctgcgtaccacac

SEQ ID NO: 823 - RNA, 34 nt, synthetic construct
  source 1..34: mol_type = other RNA
tactgtgggtactcgaaggggctgcgtacgacac

SEQ ID NO: 824 - RNA, 34 nt, synthetic construct
  source 1..34: mol_type = other RNA
tactgtgggtactcgaaggggctgcgtactacac

SEQ ID NO: 825 - RNA, 35 nt, synthetic construct
  source 1..35: mol_type = other RNA
gtactgtgggtactcgaaggggctgcgtacaacac

SEQ ID NO: 826 - RNA, 35 nt, synthetic construct
  source 1..35: mol_type = other RNA
gtactgtgggtactcgaaggggctgcgtaccacac

SEQ ID NO: 827 - RNA, 35 nt, synthetic construct
  source 1..35: mol_type = other RNA
gtactgtgggtactcgaaggggctgcgtacgacac

SEQ ID NO: 828 - RNA, 35 nt, synthetic construct
  source 1..35: mol_type = other RNA
gtactgtgggtactcgaaggggctgcgtactacac

SEQ ID NO: 829 - RNA, 36 nt, synthetic construct
  source 1..36: mol_type = other RNA
agtactgtgggtactcgaaggggctgcgtacaacac

SEQ ID NO: 830 - RNA, 36 nt, synthetic construct
  source 1..36: mol_type = other RNA
agtactgtgggtactcgaaggggctgcgtaccacac

SEQ ID NO: 831 - RNA, 36 nt, synthetic construct
  source 1..36: mol_type = other RNA
agtactgtgggtactcgaaggggctgcgtacgacac

SEQ ID NO: 832 - RNA, 36 nt, synthetic construct
  source 1..36: mol_type = other RNA
agtactgtgggtactcgaaggggctgcgtactacac

SEQ ID NO: 833 - RNA, 37 nt, synthetic construct
  source 1..37: mol_type = other RNA
tagtactgtgggtactcgaaggggctgcgtacaacac

SEQ ID NO: 834 - RNA, 37 nt, synthetic construct
  source 1..37: mol_type = other RNA
tagtactgtgggtactcgaaggggctgcgtaccacac

SEQ ID NO: 835 - RNA, 37 nt, synthetic construct
  source 1..37: mol_type = other RNA
tagtactgtgggtactcgaaggggctgcgtacgacac

SEQ ID NO: 836 - RNA, 37 nt, synthetic construct
  source 1..37: mol_type = other RNA
tagtactgtgggtactcgaaggggctgcgtactacac

SEQ ID NO: 837 - RNA, 38 nt, synthetic construct
  source 1..38: mol_type = other RNA
gtagtactgtgggtactcgaaggggctgcgtacaacac

SEQ ID NO: 838 - RNA, 38 nt, synthetic construct
  source 1..38: mol_type = other RNA
gtagtactgtgggtactcgaaggggctgcgtaccacac

SEQ ID NO: 839 - RNA, 38 nt, synthetic construct
  source 1..38: mol_type = other RNA
gtagtactgtgggtactcgaaggggctgcgtacgacac

SEQ ID NO: 840 - RNA, 38 nt, synthetic construct
  source 1..38: mol_type = other RNA
gtagtactgtgggtactcgaaggggctgcgtactacac

SEQ ID NO: 841 - RNA, 39 nt, synthetic construct
  source 1..39: mol_type = other RNA
ggtagtactgtgggtactcgaaggggctgcgtacaacac

SEQ ID NO: 842 - RNA, 39 nt, synthetic construct
  source 1..39: mol_type = other RNA
ggtagtactgtgggtactcgaaggggctgcgtaccacac

SEQ ID NO: 843 - RNA, 39 nt, synthetic construct
  source 1..39: mol_type = other RNA
ggtagtactgtgggtactcgaaggggctgcgtacgacac

SEQ ID NO: 844 - RNA, 39 nt, synthetic construct
  source 1..39: mol_type = other RNA
ggtagtactgtgggtactcgaaggggctgcgtactacac

SEQ ID NO: 845 - RNA, 40 nt, synthetic construct
  source 1..40: mol_type = other RNA
aggtagtactgtgggtactcgaaggggctgcgtacaacac

SEQ ID NO: 846 - RNA, 40 nt, synthetic construct
  source 1..40: mol_type = other RNA
aggtagtactgtgggtactcgaaggggctgcgtaccacac

SEQ ID NO: 847 - RNA, 40 nt, synthetic construct
  source 1..40: mol_type = other RNA
aggtagtactgtgggtactcgaaggggctgcgtacgacac

SEQ ID NO: 848 - RNA, 40 nt, synthetic construct
  source 1..40: mol_type = other RNA
aggtagtactgtgggtactcgaaggggctgcgtactacac

SEQ ID NO: 849 - RNA, 20 nt, synthetic construct
  source 1..20: mol_type = other RNA
aaacatgtaggcggccagca

SEQ ID NO: 850 - RNA, 20 nt, synthetic construct
  source 1..20: mol_type = other RNA
agaactgccatggctcagcc

SEQ ID NO: 851 - RNA, 20 nt, synthetic construct
  source 1..20: mol_type = other RNA
agagcgtgaggaagttgatg

SEQ ID NO: 852 - RNA, 20 nt, synthetic construct
  source 1..20: mol_type = other RNA
cacgatcagcagaaacatgt

SEQ ID NO: 853 - RNA, 20 nt, synthetic construct
  source 1..20: mol_type = other RNA
gatcagcagaaacatgtagg

SEQ ID NO: 854 - RNA, 20 nt, synthetic construct
  source 1..20: mol_type = other RNA
gccagcatggagaactgcca

SEQ ID NO: 855 - RNA, 20 nt, synthetic construct
  source 1..20: mol_type = other RNA
ggctcagccaggtagtactg

SEQ ID NO: 856 - RNA, 20 nt, synthetic construct
  source 1..20: mol_type = other RNA
gtagagcgtgaggaagttga

SEQ ID NO: 857 - RNA, 20 nt, synthetic construct
  source 1..20: mol_type = other RNA
tagagcgtgaggaagttgat

SEQ ID NO: 858 - RNA, 20 nt, synthetic construct
  source 1..20: mol_type = other RNA
ggacggtgacgtagagcgtg

SEQ ID NO: 859 - RNA, 20 nt, synthetic construct
  source 1..20: mol_type = other RNA
gcgtactacacccgtcgcat

SEQ ID NO: 860 - RNA, 20 nt, synthetic construct
  source 1..20: mol_type = other RNA
gcgtacaacacccgtcgcat

SEQ ID NO: 861 - RNA, 20 nt, synthetic construct
  source 1..20: mol_type = other RNA
gcgtacgacacccgtcgcat

SEQ ID NO: 862 - RNA, 20 nt, synthetic construct
  source 1..20: mol_type = other RNA
gcgtaccacacccgtcgcat

SEQ ID NO: 863 - RNA, 124 nt, synthetic construct
  source 1..124: mol_type = other RNA
cttctccaatgcgacgggtggttttagagctagaaatagcaagttaaaataaggctagtccgttatcaacttgaaaaagtggcaccgagtcggtgcgaaggggctgcgtaccacacccgtcgca

SEQ ID NO: 864 - RNA, 124 nt, synthetic construct
  source 1..124: mol_type = other RNA
cttctccaatgcgacgggtggttttagagctagaaatagcaagttaaaataaggctagtccgttatcaacttgaaaaagtggcaccgagtcggtgcgaaggggctgcgtacgacacccgtcgca

SEQ ID NO: 865 - RNA, 124 nt, synthetic construct
  source 1..124: mol_type = other RNA
cttctccaatgcgacgggtggttttagagctagaaatagcaagttaaaataaggctagtccgttatcaacttgaaaaagtggcaccgagtcggtgcgaaggggctgcgtactacacccgtcgca

SEQ ID NO: 866 - RNA, 124 nt, synthetic construct
  source 1..124: mol_type = other RNA
cttctccaatgcgacgggtggttttagagctagaaatagcaagttaaaataaggctagtccgttatcaacttgaaaaagtggcaccgagtcggtgcgaaggggctgcgtacaacacccgtcgca

SEQ ID NO: 867 - RNA, 125 nt, synthetic construct
  source 1..125: mol_type = other RNA
cttctccaatgcgacgggtggttttagagctagaaatagcaagttaaaataaggctagtccgttatcaacttgaaaaagtggcaccgagtcggtgcgaaggggctgcgtacgacacccgtcgcat

SEQ ID NO: 868 - RNA, 125 nt, synthetic construct
  source 1..125: mol_type = other RNA
cttctccaatgcgacgggtggttttagagctagaaatagcaagttaaaataaggctagtccgttatcaacttgaaaaagtggcaccgagtcggtgctcgaaggggctgcgtacgacacccgtcgc

SEQ ID NO: 869 - RNA, 125 nt, synthetic construct
  source 1..125: mol_type = other RNA
cttctccaatgcgacgggtggttttagagctagaaatagcaagttaaaataaggctagtccgttatcaacttgaaaaagtggcaccgagtcggtgcgaaggggctgcgtactacacccgtcgcat

SEQ ID NO: 870 - RNA, 125 nt, synthetic construct
  source 1..125: mol_type = other RNA
cttctccaatgcgacgggtggttttagagctagaaatagcaagttaaaataaggctagtccgttatcaacttgaaaaagtggcaccgagtcggtgctcgaaggggctgcgtactacacccgtcgc

SEQ ID NO: 871 - RNA, 125 nt, synthetic construct
  source 1..125: mol_type = other RNA
cttctccaatgcgacgggtggttttagagctagaaatagcaagttaaaataaggctagtccgttatcaacttgaaaaagtggcaccgagtcggtgcgaaggggctgcgtaccacacccgtcgcat

SEQ ID NO: 872 - RNA, 125 nt, synthetic construct
  source 1..125: mol_type = other RNA
cttctccaatgcgacgggtggttttagagctagaaatagcaagttaaaataaggctagtccgttatcaacttgaaaaagtggcaccgagtcggtgctcgaaggggctgcgtaccacacccgtcgc

SEQ ID NO: 873 - RNA, 125 nt, synthetic construct
  source 1..125: mol_type = other RNA
cttctccaatgcgacgggtggttttagagctagaaatagcaagttaaaataaggctagtccgttatcaacttgaaaaagtggcaccgagtcggtgcgaaggggctgcgtacaacacccgtcgcat

SEQ ID NO: 874 - RNA, 125 nt, synthetic construct
  source 1..125: mol_type = other RNA
cttctccaatgcgacgggtggttttagagctagaaatagcaagttaaaataaggctagtccgttatcaacttgaaaaagtggcaccgagtcggtgctcgaaggggctgcgtacaacacccgtcgc

SEQ ID NO: 875 - RNA, 125 nt, synthetic construct
  source 1..125: mol_type = other RNA
gcttctccaatgcgacgggtggttttagagctagaaatagcaagttaaaataaggctagtccgttatcaacttgaaaaagtggcaccgagtcggtgcgaaggggctgcgtactacacccgtcgca

SEQ ID NO: 876 - RNA, 126 nt, synthetic construct
  source 1..126: mol_type = other RNA
cttctccaatgcgacgggtggttttagagctagaaatagcaagttaaaataaggctagtccgttatcaacttgaaaaagtggcaccgagtcggtgcgaaggggctgcgtaccacacccgtcgcatt

SEQ ID NO: 877 - RNA, 126 nt, synthetic construct
  source 1..126: mol_type = other RNA
cttctccaatgcgacgggtggttttagagctagaaatagcaagttaaaataaggctagtccgttatcaacttgaaaaagtggcaccgagtcggtgctcgaaggggctgcgtaccacacccgtcgca

SEQ ID NO: 878 - RNA, 126 nt, synthetic construct
  source 1..126: mol_type = other RNA
cttctccaatgcgacgggtggttttagagctagaaatagcaagttaaaataaggctagtccgttatcaacttgaaaaagtggcaccgagtcggtgcgaaggggctgcgtacgacacccgtcgcatt

SEQ ID NO: 879 - RNA, 126 nt, synthetic construct
  source 1..126: mol_type = other RNA
cttctccaatgcgacgggtggttttagagctagaaatagcaagttaaaataaggctagtccgttatcaacttgaaaaagtggcaccgagtcggtgctcgaaggggctgcgtacgacacccgtcgca

SEQ ID NO: 880 - RNA, 126 nt, synthetic construct
  source 1..126: mol_type = other RNA
cttctccaatgcgacgggtggttttagagctagaaatagcaagttaaaataaggctagtccgttatcaacttgaaaaagtggcaccgagtcggtgcgaaggggctgcgtactacacccgtcgcatt

SEQ ID NO: 881 - RNA, 126 nt, synthetic construct
  source 1..126: mol_type = other RNA
cttctccaatgcgacgggtggttttagagctagaaatagcaagttaaaataaggctagtccgttatcaacttgaaaaagtggcaccgagtcggtgctcgaaggggctgcgtactacacccgtcgca

SEQ ID NO: 882 - RNA, 126 nt, synthetic construct
  source 1..126: mol_type = other RNA
cttctccaatgcgacgggtggttttagagctagaaatagcaagttaaaataaggctagtccgttatcaacttgaaaaagtggcaccgagtcggtgcgaaggggctgcgtacaacacccgtcgcatt

SEQ ID NO: 883 - RNA, 126 nt, synthetic construct
  source 1..126: mol_type = other RNA
cttctccaatgcgacgggtggttttagagctagaaatagcaagttaaaataaggctagtccgttatcaacttgaaaaagtggcaccgagtcggtgctcgaaggggctgcgtacaacacccgtcgca

SEQ ID NO: 884 - RNA, 126 nt, synthetic construct
  source 1..126: mol_type = other RNA
gcttctccaatgcgacgggtggttttagagctagaaatagcaagttaaaataaggctagtccgttatcaacttgaaaaagtggcaccgagtcggtgcgaaggggctgcgtactacacccgtcgcat

SEQ ID NO: 885 - RNA, 127 nt, synthetic construct
  source 1..127: mol_type = other RNA
cttctccaatgcgacgggtggttttagagctagaaatagcaagttaaaataaggctagtccgttatcaacttgaaaaagtggcaccgagtcggtgcgaaggggctgcgtacgacacccgtcgcattg

SEQ ID NO: 886 - RNA, 127 nt, synthetic construct
  source 1..127: mol_type = other RNA
cttctccaatgcgacgggtggttttagagctagaaatagcaagttaaaataaggctagtccgttatcaacttgaaaaagtggcaccgagtcggtgctcgaaggggctgcgtacgacacccgtcgcat

SEQ ID NO: 887 - RNA, 127 nt, synthetic construct
  source 1..127: mol_type = other RNA
cttctccaatgcgacgggtggttttagagctagaaatagcaagttaaaataaggctagtccgttatcaacttgaaaaagtggcaccgagtcggtgcgaaggggctgcgtactacacccgtcgcattg

SEQ ID NO: 888 - RNA, 127 nt, synthetic construct
  source 1..127: mol_type = other RNA
cttctccaatgcgacgggtggttttagagctagaaatagcaagttaaaataaggctagtccgttatcaacttgaaaaagtggcaccgagtcggtgctcgaaggggctgcgtactacacccgtcgcat

SEQ ID NO: 889 - RNA, 127 nt, synthetic construct
  source 1..127: mol_type = other RNA
cttctccaatgcgacgggtggttttagagctagaaatagcaagttaaaataaggctagtccgttatcaacttgaaaaagtggcaccgagtcggtgcgaaggggctgcgtaccacacccgtcgcattg

SEQ ID NO: 890 - RNA, 127 nt, synthetic construct
  source 1..127: mol_type = other RNA
cttctccaatgcgacgggtggttttagagctagaaatagcaagttaaaataaggctagtccgttatcaacttgaaaaagtggcaccgagtcggtgctcgaaggggctgcgtaccacacccgtcgcat

SEQ ID NO: 891 - RNA, 127 nt, synthetic construct
  source 1..127: mol_type = other RNA
cttctccaatgcgacgggtggttttagagctagaaatagcaagttaaaataaggctagtccgttatcaacttgaaaaagtggcaccgagtcggtgcgaaggggctgcgtacaacacccgtcgcattg

SEQ ID NO: 892 - RNA, 127 nt, synthetic construct
  source 1..127: mol_type = other RNA
cttctccaatgcgacgggtggttttagagctagaaatagcaagttaaaataaggctagtccgttatcaacttgaaaaagtggcaccgagtcggtgctcgaaggggctgcgtacaacacccgtcgcat

SEQ ID NO: 893 - RNA, 127 nt, synthetic construct
  source 1..127: mol_type = other RNA
gcttctccaatgcgacgggtggttttagagctagaaatagcaagttaaaataaggctagtccgttatcaacttgaaaaagtggcaccgagtcggtgctcgaaggggctgcgtactacacccgtcgca

SEQ ID NO: 894 - RNA, 128 nt, synthetic construct
  source 1..128: mol_type = other RNA
cttctccaatgcgacgggtggttttagagctagaaatagcaagttaaaataaggctagtccgttatcaacttgaaaaagtggcaccgagtcggtgcgaaggggctgcgtaccacacccgtcgcatttt

SEQ ID NO: 895 - RNA, 128 nt, synthetic construct
  source 1..128: mol_type = other RNA
cttctccaatgcgacgggtggttttagagctagaaatagcaagttaaaataaggctagtccgttatcaacttgaaaaagtggcaccgagtcggtgcgaaggggctgcgtaccacacccgtcgcattgg

SEQ ID NO: 896 - RNA, 128 nt, synthetic construct
  source 1..128: mol_type = other RNA
cttctccaatgcgacgggtggttttagagctagaaatagcaagttaaaataaggctagtccgttatcaacttgaaaaagtggcaccgagtcggtgctcgaaggggctgcgtaccacacccgtcgcatt

SEQ ID NO: 897 - RNA, 128 nt, synthetic construct
  source 1..128: mol_type = other RNA
cttctccaatgcgacgggtggttttagagctagaaatagcaagttaaaataaggctagtccgttatcaacttgaaaaagtggcaccgagtcggtgcactcgaaggggctgcgtaccacacccgtcgca

SEQ ID NO: 898 - RNA, 128 nt, synthetic construct
  source 1..128: mol_type = other RNA
cttctccaatgcgacgggtggttttagagctagaaatagcaagttaaaataaggctagtccgttatcaacttgaaaaagtggcaccgagtcggtgcgaaggggctgcgtacgacacccgtcgcattgg

SEQ ID NO: 899 - RNA, 128 nt, synthetic construct
  source 1..128: mol_type = other RNA
cttctccaatgcgacgggtggttttagagctagaaatagcaagttaaaataaggctagtccgttatcaacttgaaaaagtggcaccgagtcggtgctcgaaggggctgcgtacgacacccgtcgcatt

SEQ ID NO: 900 - RNA, 128 nt, synthetic construct
  source 1..128: mol_type = other RNA
cttctccaatgcgacgggtggttttagagctagaaatagcaagttaaaataaggctagtccgttatcaacttgaaaaagtggcaccgagtcggtgcgaaggggctgcgtactacacccgtcgcattgg

SEQ ID NO: 901 - RNA, 128 nt, synthetic construct
  source 1..128: mol_type = other RNA
cttctccaatgcgacgggtggttttagagctagaaatagcaagttaaaataaggctagtccgttatcaacttgaaaaagtggcaccgagtcggtgctcgaaggggctgcgtactacacccgtcgcatt

SEQ ID NO: 902 - RNA, 128 nt, synthetic construct
  source 1..128: mol_type = other RNA
cttctccaatgcgacgggtggttttagagctagaaatagcaagttaaaataaggctagtccgttatcaacttgaaaaagtggcaccgagtcggtgcgaaggggctgcgtacaacacccgtcgcattgg

SEQ ID NO: 903 - RNA, 128 nt, synthetic construct
  source 1..128: mol_type = other RNA
cttctccaatgcgacgggtggttttagagctagaaatagcaagttaaaataaggctagtccgttatcaacttgaaaaagtggcaccgagtcggtgctcgaaggggctgcgtacaacacccgtcgcatt

SEQ ID NO: 904 - RNA, 128 nt, synthetic construct
  source 1..128: mol_type = other RNA
gcttctccaatgcgacgggtggttttagagctagaaatagcaagttaaaataaggctagtccgttatcaacttgaaaaagtggcaccgagtcggtgctcgaaggggctgcgtacgacacccgtcgcat

SEQ ID NO: 905 - RNA, 129 nt, synthetic construct
  source 1..129: mol_type = other RNA
cttctccaatgcgacgggtggttttagagctagaaatagcaagttaaaataaggctagtccgttatcaacttgaaaaagtggcaccgagtcggtgcgaaggggctgcgtacgacacccgtcgcattgga

SEQ ID NO: 906 - RNA, 129 nt, synthetic construct
  source 1..129: mol_type = other RNA
cttctccaatgcgacgggtggttttagagctagaaatagcaagttaaaataaggctagtccgttatcaacttgaaaaagtggcaccgagtcggtgctcgaaggggctgcgtacgacacccgtcgcattg

SEQ ID NO: 907 - RNA, 129 nt, synthetic construct
  source 1..129: mol_type = other RNA
cttctccaatgcgacgggtggttttagagctagaaatagcaagttaaaataaggctagtccgttatcaacttgaaaaagtggcaccgagtcggtgcgaaggggctgcgtactacacccgtcgcattgga

SEQ ID NO: 908 - RNA, 129 nt, synthetic construct
  source 1..129: mol_type = other RNA
cttctccaatgcgacgggtggttttagagctagaaatagcaagttaaaataaggctagtccgttatcaacttgaaaaagtggcaccgagtcggtgctcgaaggggctgcgtactacacccgtcgcattg

SEQ ID NO: 909 - RNA, 129 nt, synthetic construct
  source 1..129: mol_type = other RNA
cttctccaatgcgacgggtggttttagagctagaaatagcaagttaaaataaggctagtccgttatcaacttgaaaaagtggcaccgagtcggtgcgaaggggctgcgtaccacacccgtcgcattgga

SEQ ID NO: 910 - RNA, 129 nt, synthetic construct
  source 1..129: mol_type = other RNA
cttctccaatgcgacgggtggttttagagctagaaatagcaagttaaaataaggctagtccgttatcaacttgaaaaagtggcaccgagtcggtgctcgaaggggctgcgtaccacacccgtcgcattg

SEQ ID NO: 911 - RNA, 129 nt, synthetic construct
  source 1..129: mol_type = other RNA
cttctccaatgcgacgggtggttttagagctagaaatagcaagttaaaataaggctagtccgttatcaacttgaaaaagtggcaccgagtcggtgcgaaggggctgcgtacaacacccgtcgcattgga

SEQ ID NO: 912 - RNA, 129 nt, synthetic construct
  source 1..129: mol_type = other RNA
cttctccaatgcgacgggtggttttagagctagaaatagcaagttaaaataaggctagtccgttatcaacttgaaaaagtggcaccgagtcggtgctcgaaggggctgcgtacaacacccgtcgcattg

SEQ ID NO: 913 - RNA, 129 nt, synthetic construct
  source 1..129: mol_type = other RNA
gcttctccaatgcgacgggtggttttagagctagaaatagcaagttaaaataaggctagtccgttatcaacttgaaaaagtggcaccgagtcggtgctcgaaggggctgcgtactacacccgtcgcatt

SEQ ID NO: 914 - RNA, 129 nt, synthetic construct
  source 1..129: mol_type = other RNA
gcttctccaatgcgacgggtggttttagagctagaaatagcaagttaaaataaggctagtccgttatcaacttgaaaaagtggcaccgagtcggtgcgaaggggctgcgtactacacccgtcgcattgg

SEQ ID NO: 915 - RNA, 130 nt, synthetic construct
  source 1..130: mol_type = other RNA
cttctccaatgcgacgggtggttttagagctagaaatagcaagttaaaataaggctagtccgttatcaacttgaaaaagtggcaccgagtcggtgctcgaaggggctgcgtaccacacccgtcgcatttt

SEQ ID NO: 916 - RNA, 130 nt, synthetic construct
  source 1..130: mol_type = other RNA
cttctccaatgcgacgggtggttttagagctagaaatagcaagttaaaataaggctagtccgttatcaacttgaaaaagtggcaccgagtcggtgcgaaggggctgcgtaccacacccgtcgcatttttt

SEQ ID NO: 917 - RNA, 130 nt, synthetic construct
  source 1..130: mol_type = other RNA
cttctccaatgcgacgggtggttttagagctagaaatagcaagttaaaataaggctagtccgttatcaacttgaaaaagtggcaccgagtcggtgcgaaggggctgcgtaccacacccgtcgcattggag

SEQ ID NO: 918 - RNA, 130 nt, synthetic construct
  source 1..130: mol_type = other RNA
cttctccaatgcgacgggtggttttagagctagaaatagcaagttaaaataaggctagtccgttatcaacttgaaaaagtggcaccgagtcggtgctcgaaggggctgcgtaccacacccgtcgcattgg

SEQ ID NO: 919 - RNA, 130 nt, synthetic construct
  source 1..130: mol_type = other RNA
cttctccaatgcgacgggtggttttagagctagaaatagcaagttaaaataaggctagtccgttatcaacttgaaaaagtggcaccgagtcggtgcactcgaaggggctgcgtaccacacccgtcgcatt

SEQ ID NO: 920 - RNA, 130 nt, synthetic construct
  source 1..130: mol_type = other RNA
cttctccaatgcgacgggtggttttagagctagaaatagcaagttaaaataaggctagtccgttatcaacttgaaaaagtggcaccgagtcggtgcgtactcgaaggggctgcgtaccacacccgtcgca

SEQ ID NO: 921 - RNA, 130 nt, synthetic construct
  source 1..130: mol_type = other RNA
cttctccaatgcgacgggtggttttagagctagaaatagcaagttaaaataaggctagtccgttatcaacttgaaaaagtggcaccgagtcggtgcgaaggggctgcgtacgacacccgtcgcattggag

SEQ ID NO: 922 - RNA, 130 nt, synthetic construct
  source 1..130: mol_type = other RNA
cttctccaatgcgacgggtggttttagagctagaaatagcaagttaaaataaggctagtccgttatcaacttgaaaaagtggcaccgagtcggtgctcgaaggggctgcgtacgacacccgtcgcattgg

SEQ ID NO: 923 - RNA, 130 nt, synthetic construct
  source 1..130: mol_type = other RNA
cttctccaatgcgacgggtggttttagagctagaaatagcaagttaaaataaggctagtccgttatcaacttgaaaaagtggcaccgagtcggtgcgaaggggctgcgtactacacccgtcgcattggag

SEQ ID NO: 924 - RNA, 130 nt, synthetic construct
  source 1..130: mol_type = other RNA
cttctccaatgcgacgggtggttttagagctagaaatagcaagttaaaataaggctagtccgttatcaacttgaaaaagtggcaccgagtcggtgctcgaaggggctgcgtactacacccgtcgcattgg

SEQ ID NO: 925 - RNA, 130 nt, synthetic construct
  source 1..130: mol_type = other RNA
cttctccaatgcgacgggtggttttagagctagaaatagcaagttaaaataaggctagtccgttatcaacttgaaaaagtggcaccgagtcggtgcgaaggggctgcgtacaacacccgtcgcattggag

SEQ ID NO: 926 - RNA, 130 nt, synthetic construct
  source 1..130: mol_type = other RNA
cttctccaatgcgacgggtggttttagagctagaaatagcaagttaaaataaggctagtccgttatcaacttgaaaaagtggcaccgagtcggtgctcgaaggggctgcgtacaacacccgtcgcattgg

SEQ ID NO: 927 - RNA, 130 nt, synthetic construct
  source 1..130: mol_type = other RNA
cttctccaatgcgacgggtggtttaagagctagaaatagcaagtttaaataaggctagtccgttatcaacttgaaaaagtggcaccgagtcggtgctcgaaggggctgcgtacgacacccgtcgcattgg

SEQ ID NO: 928 - RNA, 130 nt, synthetic construct
  source 1..130: mol_type = other RNA
cttctccaatgcgacgggtggtttaagagctagaaatagcaagtttaaataaggctagtccgttatcagcgtgaaaacgcggcaccgagtcggtgctcgaaggggctgcgtacgacacccgtcgcattgg

SEQ ID NO: 929 - RNA, 130 nt, synthetic construct
  source 1..130: mol_type = other RNA
gcttctccaatgcgacgggtggttttagagctagaaatagcaagttaaaataaggctagtccgttatcaacttgaaaaagtggcaccgagtcggtgctcgaaggggctgcgtactacacccgtcgcattg

SEQ ID NO: 930 - RNA, 131 nt, synthetic construct
  source 1..131: mol_type = other RNA
cttctccaatgcgacgggtggttttagagctagaaatagcaagttaaaataaggctagtccgttatcaacttgaaaaagtggcaccgagtcggtgcgaaggggctgcgtacgacacccgtcgcattggaga

SEQ ID NO: 931 - RNA, 131 nt, synthetic construct
  source 1..131: mol_type = other RNA
cttctccaatgcgacgggtggttttagagctagaaatagcaagttaaaataaggctagtccgttatcaacttgaaaaagtggcaccgagtcggtgctcgaaggggctgcgtacgacacccgtcgcattgga

SEQ ID NO: 932 - RNA, 131 nt, synthetic construct
  source 1..131: mol_type = other RNA
cttctccaatgcgacgggtggttttagagctagaaatagcaagttaaaataaggctagtccgttatcaacttgaaaaagtggcaccgagtcggtgcgaaggggctgcgtactacacccgtcgcattggaga

SEQ ID NO: 933 - RNA, 131 nt, synthetic construct
  source 1..131: mol_type = other RNA
cttctccaatgcgacgggtggttttagagctagaaatagcaagttaaaataaggctagtccgttatcaacttgaaaaagtggcaccgagtcggtgctcgaaggggctgcgtactacacccgtcgcattgga

SEQ ID NO: 934 - RNA, 131 nt, synthetic construct
  source 1..131: mol_type = other RNA
cttctccaatgcgacgggtggttttagagctagaaatagcaagttaaaataaggctagtccgttatcaacttgaaaaagtggcaccgagtcggtgcgaaggggctgcgtaccacacccgtcgcattggaga

SEQ ID NO: 935 - RNA, 131 nt, synthetic construct
  source 1..131: mol_type = other RNA
cttctccaatgcgacgggtggttttagagctagaaatagcaagttaaaataaggctagtccgttatcaacttgaaaaagtggcaccgagtcggtgctcgaaggggctgcgtaccacacccgtcgcattgga

SEQ ID NO: 936 - RNA, 131 nt, synthetic construct
  source 1..131: mol_type = other RNA
cttctccaatgcgacgggtggttttagagctagaaatagcaagttaaaataaggctagtccgttatcaacttgaaaaagtggcaccgagtcggtgcgaaggggctgcgtacaacacccgtcgcattggaga

SEQ ID NO: 937 - RNA, 131 nt, synthetic construct
  source 1..131: mol_type = other RNA
cttctccaatgcgacgggtggttttagagctagaaatagcaagttaaaataaggctagtccgttatcaacttgaaaaagtggcaccgagtcggtgctcgaaggggctgcgtacaacacccgtcgcattgga

SEQ ID NO: 938 - RNA, 131 nt, synthetic construct
  source 1..131: mol_type = other RNA
gcttctccaatgcgacgggtggttttagagctagaaatagcaagttaaaataaggctagtccgttatcaacttgaaaaagtggcaccgagtcggtgctcgaaggggctgcgtacgacacccgtcgcattgg

SEQ ID NO: 939 - RNA, 132 nt, synthetic construct
  source 1..132: mol_type = other RNA
cttctccaatgcgacgggtggttttagagctagaaatagcaagttaaaataaggctagtccgttatcaacttgaaaaagtggcaccgagtcggtgcactcgaaggggctgcgtaccacacccgtcgcatttt

SEQ ID NO: 940 - RNA, 132 nt, synthetic construct
  source 1..132: mol_type = other RNA
cttctccaatgcgacgggtggttttagagctagaaatagcaagttaaaataaggctagtccgttatcaacttgaaaaagtggcaccgagtcggtgctcgaaggggctgcgtaccacacccgtcgcatttttt

SEQ ID NO: 941 - RNA, 132 nt, synthetic construct
  source 1..132: mol_type = other RNA
cttctccaatgcgacgggtggttttagagctagaaatagcaagttaaaataaggctagtccgttatcaacttgaaaaagtggcaccgagtcggtgcgaaggggctgcgtaccacacccgtcgcattggtttt

SEQ ID NO: 942 - RNA, 132 nt, synthetic construct
  source 1..132: mol_type = other RNA
cttctccaatgcgacgggtggttttagagctagaaatagcaagttaaaataaggctagtccgttatcaacttgaaaaagtggcaccgagtcggtgctcgaaggggctgcgtaccacacccgtcgcattggag

SEQ ID NO: 943 - RNA, 132 nt, synthetic construct
  source 1..132: mol_type = other RNA
cttctccaatgcgacgggtggttttagagctagaaatagcaagttaaaataaggctagtccgttatcaacttgaaaaagtggcaccgagtcggtgcactcgaaggggctgcgtaccacacccgtcgcattgg

SEQ ID NO: 944 - RNA, 132 nt, synthetic construct
  source 1..132: mol_type = other RNA
cttctccaatgcgacgggtggttttagagctagaaatagcaagttaaaataaggctagtccgttatcaacttgaaaaagtggcaccgagtcggtgcgtactcgaaggggctgcgtaccacacccgtcgcatt

SEQ ID NO: 945 - RNA, 132 nt, synthetic construct
  source 1..132: mol_type = other RNA
cttctccaatgcgacgggtggttttagagctagaaatagcaagttaaaataaggctagtccgttatcaacttgaaaaagtggcaccgagtcggtgcgggtactcgaaggggctgcgtaccacacccgtcgca

SEQ ID NO: 946 - RNA, 132 nt, synthetic construct
  source 1..132: mol_type = other RNA
cttctccaatgcgacgggtggttttagagctagaaatagcaagttaaaataaggctagtccgttatcaacttgaaaaagtggcaccgagtcggtgcgaaggggctgcgtacgacacccgtcgcattggagaa

SEQ ID NO: 947 - RNA, 132 nt, synthetic construct
  source 1..132: mol_type = other RNA
cttctccaatgcgacgggtggttttagagctagaaatagcaagttaaaataaggctagtccgttatcaacttgaaaaagtggcaccgagtcggtgctcgaaggggctgcgtacgacacccgtcgcattggag

SEQ ID NO: 948 - RNA, 132 nt, synthetic construct
  source 1..132: mol_type = other RNA
cttctccaatgcgacgggtggttttagagctagaaatagcaagttaaaataaggctagtccgttatcaacttgaaaaagtggcaccgagtcggtgcgaaggggctgcgtactacacccgtcgcattggagaa

SEQ ID NO: 949 - RNA, 132 nt, synthetic construct
  source 1..132: mol_type = other RNA
cttctccaatgcgacgggtggttttagagctagaaatagcaagttaaaataaggctagtccgttatcaacttgaaaaagtggcaccgagtcggtgctcgaaggggctgcgtactacacccgtcgcattggag

SEQ ID NO: 950 - RNA, 132 nt, synthetic construct
  source 1..132: mol_type = other RNA
cttctccaatgcgacgggtggttttagagctagaaatagcaagttaaaataaggctagtccgttatcaacttgaaaaagtggcaccgagtcggtgcgaaggggctgcgtaccacacccgtcgcattggagaa

SEQ ID NO: 951 - RNA, 132 nt, synthetic construct
  source 1..132: mol_type = other RNA
cttctccaatgcgacgggtggttttagagctagaaatagcaagttaaaataaggctagtccgttatcaacttgaaaaagtggcaccgagtcggtgcgaaggggctgcgtacaacacccgtcgcattggagaa

SEQ ID NO: 952 - RNA, 132 nt, synthetic construct
  source 1..132: mol_type = other RNA
cttctccaatgcgacgggtggttttagagctagaaatagcaagttaaaataaggctagtccgttatcaacttgaaaaagtggcaccgagtcggtgctcgaaggggctgcgtacaacacccgtcgcattggag

SEQ ID NO: 953 - RNA, 132 nt, synthetic construct
  source 1..132: mol_type = other RNA
cttctccaatgcgacgggtggtttaagagcggggaaatccgcaagtttaaataaggctagtccgttatcagcgtgaaaacgcggcaccgagtcggtgctcgaaggggctgcgtacgacacccgtcgcattgg

SEQ ID NO: 954 - RNA, 132 nt, synthetic construct
  source 1..132: mol_type = other RNA
gcttctccaatgcgacgggtggttttagagctagaaatagcaagttaaaataaggctagtccgttatcaacttgaaaaagtggcaccgagtcggtgctcgaaggggctgcgtactacacccgtcgcattgga

SEQ ID NO: 955 - RNA, 133 nt, synthetic construct
  source 1..133: mol_type = other RNA
cttctccaatgcgacgggtggttttagagctagaaatagcaagttaaaataaggctagtccgttatcaacttgaaaaagtggcaccgagtcggtgctcgaaggggctgcgtacgacacccgtcgcattggaga

SEQ ID NO: 956 - RNA, 133 nt, synthetic construct
  source 1..133: mol_type = other RNA
cttctccaatgcgacgggtggttttagagctagaaatagcaagttaaaataaggctagtccgttatcaacttgaaaaagtggcaccgagtcggtgctcgaaggggctgcgtactacacccgtcgcattggaga

SEQ ID NO: 957 - RNA, 133 nt, synthetic construct
  source 1..133: mol_type = other RNA
cttctccaatgcgacgggtggttttagagctagaaatagcaagttaaaataaggctagtccgttatcaacttgaaaaagtggcaccgagtcggtgctcgaaggggctgcgtaccacacccgtcgcattggaga

SEQ ID NO: 958 - RNA, 133 nt, synthetic construct
  source 1..133: mol_type = other RNA
cttctccaatgcgacgggtggttttagagctagaaatagcaagttaaaataaggctagtccgttatcaacttgaaaaagtggcaccgagtcggtgctcgaaggggctgcgtacaacacccgtcgcattggaga

SEQ ID NO: 959 - RNA, 134 nt, synthetic construct
  source 1..134: mol_type = other RNA
cttctccaatgcgacgggtggttttagagctagaaatagcaagttaaaataaggctagtccgttatcaacttgaaaaagtggcaccgagtcggtgcgtactcgaaggggctgcgtaccacacccgtcgcatttt

SEQ ID NO: 960 - RNA, 134 nt, synthetic construct
  source 1..134: mol_type = other RNA
cttctccaatgcgacgggtggttttagagctagaaatagcaagttaaaataaggctagtccgttatcaacttgaaaaagtggcaccgagtcggtgcactcgaaggggctgcgtaccacacccgtcgcatttttt

SEQ ID NO: 961 - RNA, 134 nt, synthetic construct
  source 1..134: mol_type = other RNA
cttctccaatgcgacgggtggttttagagctagaaatagcaagttaaaataaggctagtccgttatcaacttgaaaaagtggcaccgagtcggtgctcgaaggggctgcgtaccacacccgtcgcattggtttt

SEQ ID NO: 962 - RNA, 134 nt, synthetic construct
  source 1..134: mol_type = other RNA
cttctccaatgcgacgggtggttttagagctagaaatagcaagttaaaataaggctagtccgttatcaacttgaaaaagtggcaccgagtcggtgcgaaggggctgcgtaccacacccgtcgcattggagtttt

SEQ ID NO: 963 - RNA, 134 nt, synthetic construct
  source 1..134: mol_type = other RNA
cttctccaatgcgacgggtggttttagagctagaaatagcaagttaaaataaggctagtccgttatcaacttgaaaaagtggcaccgagtcggtgcactcgaaggggctgcgtaccacacccgtcgcattggag

SEQ ID NO: 964 - RNA, 134 nt, synthetic construct
  source 1..134: mol_type = other RNA
cttctccaatgcgacgggtggttttagagctagaaatagcaagttaaaataaggctagtccgttatcaacttgaaaaagtggcaccgagtcggtgcgtactcgaaggggctgcgtaccacacccgtcgcattgg

SEQ ID NO: 965 - RNA, 134 nt, synthetic construct
  source 1..134: mol_type = other RNA
cttctccaatgcgacgggtggttttagagctagaaatagcaagttaaaataaggctagtccgttatcaacttgaaaaagtggcaccgagtcggtgcgggtactcgaaggggctgcgtaccacacccgtcgcatt

SEQ ID NO: 966 - RNA, 134 nt, synthetic construct
  source 1..134: mol_type = other RNA
cttctccaatgcgacgggtggttttagagctagaaatagcaagttaaaataaggctagtccgttatcaacttgaaaaagtggcaccgagtcggtgcgtgggtactcgaaggggctgcgtaccacacccgtcgca

SEQ ID NO: 967 - RNA, 134 nt, synthetic construct
  source 1..134: mol_type = other RNA
cttctccaatgcgacgggtggttttagagctagaaatagcaagttaaaataaggctagtccgttatcaacttgaaaaagtggcaccgagtcggtgctcgaaggggctgcgtacgacacccgtcgcattggagaa

SEQ ID NO: 968 - RNA, 134 nt, synthetic construct
  source 1..134: mol_type = other RNA
cttctccaatgcgacgggtggttttagagctagaaatagcaagttaaaataaggctagtccgttatcaacttgaaaaagtggcaccgagtcggtgctcgaaggggctgcgtactacacccgtcgcattggagaa

SEQ ID NO: 969 - RNA, 134 nt, synthetic construct
  source 1..134: mol_type = other RNA
cttctccaatgcgacgggtggttttagagctagaaatagcaagttaaaataaggctagtccgttatcaacttgaaaaagtggcaccgagtcggtgctcgaaggggctgcgtaccacacccgtcgcattggagaa

SEQ ID NO: 970 - RNA, 134 nt, synthetic construct
  source 1..134: mol_type = other RNA
cttctccaatgcgacgggtggttttagagctagaaatagcaagttaaaataaggctagtccgttatcaacttgaaaaagtggcaccgagtcggtgctcgaaggggctgcgtacaacacccgtcgcattggagaa

SEQ ID NO: 971 - RNA, 135 nt, synthetic construct
  source 1..135: mol_type = other RNA
gcttctccaatgcgacgggtggttttagagctagaaatagcaagttaaaataaggctagtccgttatcaacttgaaaaagtggcaccgagtcggtgctcgaaggggctgcgtacgacacccgtcgcattggagaa

SEQ ID NO: 972 - RNA, 136 nt, synthetic construct
  source 1..136: mol_type = other RNA
cttctccaatgcgacgggtggttttagagctagaaatagcaagttaaaataaggctagtccgttatcaacttgaaaaagtggcaccgagtcggtgcgtactcgaaggggctgcgtaccacacccgtcgcatttttt

SEQ ID NO: 973 - RNA, 136 nt, synthetic construct
  source 1..136: mol_type = other RNA
cttctccaatgcgacgggtggttttagagctagaaatagcaagttaaaataaggctagtccgttatcaacttgaaaaagtggcaccgagtcggtgcactcgaaggggctgcgtaccacacccgtcgcattggtttt

SEQ ID NO: 974 - RNA, 136 nt, synthetic construct
  source 1..136: mol_type = other RNA
cttctccaatgcgacgggtggttttagagctagaaatagcaagttaaaataaggctagtccgttatcaacttgaaaaagtggcaccgagtcggtgctcgaaggggctgcgtaccacacccgtcgcattggagtttt

SEQ ID NO: 975 - RNA, 136 nt, synthetic construct
  source 1..136: mol_type = other RNA
cttctccaatgcgacgggtggttttagagctagaaatagcaagttaaaataaggctagtccgttatcaacttgaaaaagtggcaccgagtcggtgcgtactcgaaggggctgcgtaccacacccgtcgcattggag

SEQ ID NO: 976 - RNA, 136 nt, synthetic construct
  source 1..136: mol_type = other RNA
cttctccaatgcgacgggtggttttagagctagaaatagcaagttaaaataaggctagtccgttatcaacttgaaaaagtggcaccgagtcggtgcgggtactcgaaggggctgcgtaccacacccgtcgcattgg

SEQ ID NO: 977 - RNA, 136 nt, synthetic construct
  source 1..136: mol_type = other RNA
cttctccaatgcgacgggtggttttagagctagaaatagcaagttaaaataaggctagtccgttatcaacttgaaaaagtggcaccgagtcggtgcgtgggtactcgaaggggctgcgtaccacacccgtcgcatt

SEQ ID NO: 978 - RNA, 138 nt, synthetic construct
  source 1..138: mol_type = other RNA
cttctccaatgcgacgggtggttttagagctagaaatagcaagttaaaataaggctagtccgttatcaacttgaaaaagtggcaccgagtcggtgcgtactcgaaggggctgcgtaccacacccgtcgcattggtttt

SEQ ID NO: 979 - RNA, 138 nt, synthetic construct
  source 1..138: mol_type = other RNA
cttctccaatgcgacgggtggttttagagctagaaatagcaagttaaaataaggctagtccgttatcaacttgaaaaagtggcaccgagtcggtgcactcgaaggggctgcgtaccacacccgtcgcattggagtttt

SEQ ID NO: 980 - RNA, 138 nt, synthetic construct
  source 1..138: mol_type = other RNA
cttctccaatgcgacgggtggttttagagctagaaatagcaagttaaaataaggctagtccgttatcaacttgaaaaagtggcaccgagtcggtgcgggtactcgaaggggctgcgtaccacacccgtcgcattggag

SEQ ID NO: 981 - RNA, 138 nt, synthetic construct
  source 1..138: mol_type = other RNA
cttctccaatgcgacgggtggttttagagctagaaatagcaagttaaaataaggctagtccgttatcaacttgaaaaagtggcaccgagtcggtgcgtgggtactcgaaggggctgcgtaccacacccgtcgcattgg

SEQ ID NO: 982 - RNA, 140 nt, synthetic construct
  source 1..140: mol_type = other RNA
gcttctccaatgcgacgggtggtttaagagcggggaaatccgcaagtttaaataaggctagtccgttatcagcgtgaaaacgcggcaccgagtcggtgctcgaaggggctgcgtacgacacccgtcgcattggttttttt

SEQ ID NO: 983 - RNA, 140 nt, synthetic construct
  source 1..140: mol_type = other RNA
cttctccaatgcgacgggtggttttagagctagaaatagcaagttaaaataaggctagtccgttatcaacttgaaaaagtggcaccgagtcggtgcgtactcgaaggggctgcgtaccacacccgtcgcattggagtttt

SEQ ID NO: 984 - RNA, 140 nt, synthetic construct
  source 1..140: mol_type = other RNA
cttctccaatgcgacgggtggttttagagctagaaatagcaagttaaaataaggctagtccgttatcaacttgaaaaagtggcaccgagtcggtgcgtgggtactcgaaggggctgcgtaccacacccgtcgcattggag

SEQ ID NO: 985 - RNA, 140 nt, synthetic construct
  source 1..140: mol_type = other RNA
cttctccaatgcgacgggtggtttaagagctatgctggaaacagcatagcaagtttaaataaggctagtccgttatcaacttgaaaaagtggcaccgagtcggtgctcgaaggggctgcgtacgacacccgtcgcattgg

SEQ ID NO: 986 - RNA, 140 nt, synthetic construct
  source 1..140: mol_type = other RNA
cttctccaatgcgacgggtggtttaagagctatgctggaaacagcatagcaagtttaaataaggctagtccgttatcagcgtgaaaacgcggcaccgagtcggtgctcgaaggggctgcgtacgacacccgtcgcattgg

SEQ ID NO: 987 - RNA, 152 nt, synthetic construct
  source 1..152: mol_type = other RNA
gcttctccaatgcgacgggtggtttaagagcggggaaatccgcaagtttaaataaggctagtccgttatcagcgtgaaaacgcggcaccgagtcggtgctcgaaggggctgcgtacgacacccgtcgcattggttggtacttcgattttttt

SEQ ID NO: 988 - RNA, 152 nt, synthetic construct
  source 1..152: mol_type = other RNA
gcttctccaatgcgacgggtggtttaagagcggggaaatccgcaagtttaaataaggctagtccgttatcagcgtgaaaacgcggcaccgagtcggtgctcgaaggggctgcgtacgacacccgtcgcattggttgtggccttcgttttttt

SEQ ID NO: 989 - RNA, 152 nt, synthetic construct
  source 1..152: mol_type = other RNA
gcttctccaatgcgacgggtggtttaagagcggggaaatccgcaagtttaaataaggctagtccgttatcagcgtgaaaacgcggcaccgagtcggtgctcgaaggggctgcgtacgacacccgtcgcattggtcactccccttcttttttt

SEQ ID NO: 990 - RNA, 152 nt, synthetic construct
  source 1..152: mol_type = other RNA
gcttctccaatgcgacgggtggtttaagagcggggaaatccgcaagtttaaataaggctagtccgttatcagcgtgaaaacgcggcaccgagtcggtgctcgaaggggctgcgtacgacacccgtcgcattggttcttgccccttttttttt

SEQ ID NO: 991 - RNA, 152 nt, synthetic construct
  source 1..152: mol_type = other RNA
gcttctccaatgcgacgggtggtttaagagcggggaaatccgcaagtttaaataaggctagtccgttatcagcgtgaaaacgcggcaccgagtcggtgctcgaaggggctgcgtacgacacccgtcgcattggtctattgcccctttttttt

SEQ ID NO: 992 - RNA, 152 nt, synthetic construct
  source 1..152: mol_type = other RNA
gcttctccaatgcgacgggtggtttaagagcggggaaatccgcaagtttaaataaggctagtccgttatcagcgtgaaaacgcggcaccgagtcggtgctcgaaggggctgcgtacgacacccgtcgcattggttaaaaagccccttttttt

SEQ ID NO: 993 - RNA, 152 nt, synthetic construct
  source 1..152: mol_type = other RNA
gcttctccaatgcgacgggtggtttaagagcggggaaatccgcaagtttaaataaggctagtccgttatcagcgtgaaaacgcggcaccgagtcggtgctcgaaggggctgcgtacgacacccgtcgcattggttaaaacagcccttttttt

SEQ ID NO: 994 - RNA, 152 nt, synthetic construct
  source 1..152: mol_type = other RNA
gcttctccaatgcgacgggtggtttaagagcggggaaatccgcaagtttaaataaggctagtccgttatcagcgtgaaaacgcggcaccgagtcggtgctcgaaggggctgcgtacgacacccgtcgcattggtaaaaagcagccttttttt

SEQ ID NO: 995 - RNA, 152 nt, synthetic construct
  source 1..152: mol_type = other RNA
gcttctccaatgcgacgggtggtttaagagcggggaaatccgcaagtttaaataaggctagtccgttatcagcgtgaaaacgcggcaccgagtcggtgctcgaaggggctgcgtacgacacccgtcgcattggcctatccgcagcttttttt

SEQ ID NO: 996 - RNA, 152 nt, synthetic construct
  source 1..152: mol_type = other RNA
gcttctccaatgcgacgggtggtttaagagcggggaaatccgcaagtttaaataaggctagtccgttatcagcgtgaaaacgcggcaccgagtcggtgctcgaaggggctgcgtacgacacccgtcgcattggcacaatacgcagttttttt

SEQ ID NO: 997 - RNA, 152 nt, synthetic construct
  source 1..152: mol_type = other RNA
gcttctccaatgcgacgggtggtttaagagcggggaaatccgcaagtttaaataaggctagtccgttatcagcgtgaaaacgcggcaccgagtcggtgctcgaaggggctgcgtacgacacccgtcgcattggtaacactacgcattttttt

SEQ ID NO: 998 - RNA, 152 nt, synthetic construct
  source 1..152: mol_type = other RNA
gcttctccaatgcgacgggtggtttaagagcggggaaatccgcaagtttaaataaggctagtccgttatcagcgtgaaaacgcggcaccgagtcggtgctcgaaggggctgcgtacgacacccgtcgcattggtatcctgtacgcttttttt

SEQ ID NO: 999 - RNA, 152 nt, synthetic construct
  source 1..152: mol_type = other RNA
gcttctccaatgcgacgggtggtttaagagcggggaaatccgcaagtttaaataaggctagtccgttatcagcgtgaaaacgcggcaccgagtcggtgctcgaaggggctgcgtacgacacccgtcgcattggtatccacgtacgttttttt

SEQ ID NO: 1000 - RNA, 152 nt, synthetic construct
  source 1..152: mol_type = other RNA
gcttctccaatgcgacgggtggtttaagagcggggaaatccgcaagtttaaataaggctagtccgttatcagcgtgaaaacgcggcaccgagtcggtgctcgaaggggctgcgtacgacacccgtcgcattggtatgcgtcgtacttttttt

SEQ ID NO: 1001 - RNA, 152 nt, synthetic construct
  source 1..152: mol_type = other RNA
gcttctccaatgcgacgggtggtttaagagcggggaaatccgcaagtttaaataaggctagtccgttatcagcgtgaaaacgcggcaccgagtcggtgctcgaaggggctgcgtacgacacccgtcgcattggtatcaggtcgtattttttt

SEQ ID NO: 1002 - RNA, 152 nt, synthetic construct
  source 1..152: mol_type = other RNA
gcttctccaatgcgacgggtggtttaagagcggggaaatccgcaagtttaaataaggctagtccgttatcagcgtgaaaacgcggcaccgagtcggtgctcgaaggggctgcgtacgacacccgtcgcattggtatatatgtcgtttttttt

SEQ ID NO: 1003 - RNA, 152 nt, synthetic construct
  source 1..152: mol_type = other RNA
gcttctccaatgcgacgggtggtttaagagcggggaaatccgcaagtttaaataaggctagtccgttatcagcgtgaaaacgcggcaccgagtcggtgctcgaaggggctgcgtacgacacccgtcgcattggtacactgtgtcgttttttt

SEQ ID NO: 1004 - RNA, 154 nt, synthetic construct
  source 1..154: mol_type = other RNA
gcttctccaatgcgacgggtggtttaagagcggggaaatccgcaagtttaaataaggctagtccgttatcagcgtgaaaacgcggcaccgagtcggtgctcgaaggggctgcgtacgacacccgtcgcattggtcactccccttcgattttttt

SEQ ID NO: 1005 - RNA, 154 nt, synthetic construct
  source 1..154: mol_type = other RNA
gcttctccaatgcgacgggtggtttaagagcggggaaatccgcaagtttaaataaggctagtccgttatcagcgtgaaaacgcggcaccgagtcggtgctcgaaggggctgcgtacgacacccgtcgcattggttcttgccccttcgttttttt

SEQ ID NO: 1006 - RNA, 154 nt, synthetic construct
  source 1..154: mol_type = other RNA
gcttctccaatgcgacgggtggtttaagagcggggaaatccgcaagtttaaataaggctagtccgttatcagcgtgaaaacgcggcaccgagtcggtgctcgaaggggctgcgtacgacacccgtcgcattggtctattgccccttcttttttt

SEQ ID NO: 1007 - RNA, 154 nt, synthetic construct
  source 1..154: mol_type = other RNA
gcttctccaatgcgacgggtggtttaagagcggggaaatccgcaagtttaaataaggctagtccgttatcagcgtgaaaacgcggcaccgagtcggtgctcgaaggggctgcgtacgacacccgtcgcattggttcttgagccccttttttttt

SEQ ID NO: 1008 - RNA, 154 nt, synthetic construct
  source 1..154: mol_type = other RNA
gcttctccaatgcgacgggtggtttaagagcggggaaatccgcaagtttaaataaggctagtccgttatcagcgtgaaaacgcggcaccgagtcggtgctcgaaggggctgcgtacgacacccgtcgcattggttaaaacagcccctttttttt

SEQ ID NO: 1009 - RNA, 154 nt, synthetic construct
  source 1..154: mol_type = other RNA
gcttctccaatgcgacgggtggtttaagagcggggaaatccgcaagtttaaataaggctagtccgttatcagcgtgaaaacgcggcaccgagtcggtgctcgaaggggctgcgtacgacacccgtcgcattggtaaaaagcagccccttttttt

SEQ ID NO: 1010 - RNA, 154 nt, synthetic construct
  source 1..154: mol_type = other RNA
gcttctccaatgcgacgggtggtttaagagcggggaaatccgcaagtttaaataaggctagtccgttatcagcgtgaaaacgcggcaccgagtcggtgctcgaaggggctgcgtacgacacccgtcgcattggcaaattcgcagcccttttttt

SEQ ID NO: 1011 - RNA, 154 nt, synthetic construct
  source 1..154: mol_type = other RNA
gcttctccaatgcgacgggtggtttaagagcggggaaatccgcaagtttaaataaggctagtccgttatcagcgtgaaaacgcggcaccgagtcggtgctcgaaggggctgcgtacgacacccgtcgcattggcacaatacgcagccttttttt

SEQ ID NO: 1012 - RNA, 154 nt, synthetic construct
  source 1..154: mol_type = other RNA
gcttctccaatgcgacgggtggtttaagagcggggaaatccgcaagtttaaataaggctagtccgttatcagcgtgaaaacgcggcaccgagtcggtgctcgaaggggctgcgtacgacacccgtcgcattggcaacactacgcagcttttttt

SEQ ID NO: 1013 - RNA, 154 nt, synthetic construct
  source 1..154: mol_type = other RNA
gcttctccaatgcgacgggtggtttaagagcggggaaatccgcaagtttaaataaggctagtccgttatcagcgtgaaaacgcggcaccgagtcggtgctcgaaggggctgcgtacgacacccgtcgcattggcccccagtacgcagttttttt

SEQ ID NO: 1014 - RNA, 154 nt, synthetic construct
  source 1..154: mol_type = other RNA
gcttctccaatgcgacgggtggtttaagagcggggaaatccgcaagtttaaataaggctagtccgttatcagcgtgaaaacgcggcaccgagtcggtgctcgaaggggctgcgtacgacacccgtcgcattggtctccccgtacgcattttttt

SEQ ID NO: 1015 - RNA, 154 nt, synthetic construct
  source 1..154: mol_type = other RNA
gcttctccaatgcgacgggtggtttaagagcggggaaatccgcaagtttaaataaggctagtccgttatcagcgtgaaaacgcggcaccgagtcggtgctcgaaggggctgcgtacgacacccgtcgcattggttctcctcgtacgcttttttt

SEQ ID NO: 1016 - RNA, 154 nt, synthetic construct
  source 1..154: mol_type = other RNA
gcttctccaatgcgacgggtggtttaagagcggggaaatccgcaagtttaaataaggctagtccgttatcagcgtgaaaacgcggcaccgagtcggtgctcgaaggggctgcgtacgacacccgtcgcattggtcaccagtcgtacgttttttt

SEQ ID NO: 1017 - RNA, 154 nt, synthetic construct
  source 1..154: mol_type = other RNA
gcttctccaatgcgacgggtggtttaagagcggggaaatccgcaagtttaaataaggctagtccgttatcagcgtgaaaacgcggcaccgagtcggtgctcgaaggggctgcgtacgacacccgtcgcattggtatccatgtcgtacttttttt

SEQ ID NO: 1018 - RNA, 154 nt, synthetic construct
  source 1..154: mol_type = other RNA
gcttctccaatgcgacgggtggtttaagagcggggaaatccgcaagtttaaataaggctagtccgttatcagcgtgaaaacgcggcaccgagtcggtgctcgaaggggctgcgtacgacacccgtcgcattggtcagcagtgtcgtattttttt

SEQ ID NO: 1019 - RNA, 154 nt, synthetic construct
  source 1..154: mol_type = other RNA
cttctccaatgcgacgggtggttttagagctagaaatagcaagttaaaataaggctagtccgttatcaacttgaaaaagtggcaccgagtcggtgcgaaggggctgcgtaccacacccgtcgcaaacattgacgcgtctctacgtgggggcgcg

SEQ ID NO: 1020 - RNA, 154 nt, synthetic construct
  source 1..154: mol_type = other RNA
cttctccaatgcgacgggtggttttagagctagaaatagcaagttaaaataaggctagtccgttatcaacttgaaaaagtggcaccgagtcggtgcgaaggggctgcgtacgacacccgtcgcaaacattgacgcgtctctacgtgggggcgcg

SEQ ID NO: 1021 - RNA, 154 nt, synthetic construct
  source 1..154: mol_type = other RNA
cttctccaatgcgacgggtggttttagagctagaaatagcaagttaaaataaggctagtccgttatcaacttgaaaaagtggcaccgagtcggtgcgaaggggctgcgtactacacccgtcgcaaacattgacgcgtctctacgtgggggcgcg

SEQ ID NO: 1022 - RNA, 154 nt, synthetic construct
  source 1..154: mol_type = other RNA
cttctccaatgcgacgggtggttttagagctagaaatagcaagttaaaataaggctagtccgttatcaacttgaaaaagtggcaccgagtcggtgcgaaggggctgcgtacaacacccgtcgcaaacattgacgcgtctctacgtgggggcgcg

SEQ ID NO: 1023 - RNA, 155 nt, synthetic construct
  source 1..155: mol_type = other RNA
cttctccaatgcgacgggtggttttagagctagaaatagcaagttaaaataaggctagtccgttatcaacttgaaaaagtggcaccgagtcggtgcgaaggggctgcgtacgacacccgtcgcataacattgacgcgtctctacgtgggggcgcg

SEQ ID NO: 1024 - RNA, 155 nt, synthetic construct
  source 1..155: mol_type = other RNA
cttctccaatgcgacgggtggttttagagctagaaatagcaagttaaaataaggctagtccgttatcaacttgaaaaagtggcaccgagtcggtgctcgaaggggctgcgtacgacacccgtcgcaacattgacgcgtctctacgtgggggcgcg

SEQ ID NO: 1025 - RNA, 155 nt, synthetic construct
  source 1..155: mol_type = other RNA
cttctccaatgcgacgggtggttttagagctagaaatagcaagttaaaataaggctagtccgttatcaacttgaaaaagtggcaccgagtcggtgcgaaggggctgcgtactacacccgtcgcataacattgacgcgtctctacgtgggggcgcg

SEQ ID NO: 1026 - RNA, 155 nt, synthetic construct
  source 1..155: mol_type = other RNA
cttctccaatgcgacgggtggttttagagctagaaatagcaagttaaaataaggctagtccgttatcaacttgaaaaagtggcaccgagtcggtgctcgaaggggctgcgtactacacccgtcgcaacattgacgcgtctctacgtgggggcgcg

SEQ ID NO: 1027 - RNA, 155 nt, synthetic construct
  source 1..155: mol_type = other RNA
cttctccaatgcgacgggtggttttagagctagaaatagcaagttaaaataaggctagtccgttatcaacttgaaaaagtggcaccgagtcggtgcgaaggggctgcgtaccacacccgtcgcataacattgacgcgtctctacgtgggggcgcg

SEQ ID NO: 1028 - RNA, 155 nt, synthetic construct
  source 1..155: mol_type = other RNA
cttctccaatgcgacgggtggttttagagctagaaatagcaagttaaaataaggctagtccgttatcaacttgaaaaagtggcaccgagtcggtgctcgaaggggctgcgtaccacacccgtcgcaacattgacgcgtctctacgtgggggcgcg

SEQ ID NO: 1029 - RNA, 155 nt, synthetic construct
  source 1..155: mol_type = other RNA
cttctccaatgcgacgggtggttttagagctagaaatagcaagttaaaataaggctagtccgttatcaacttgaaaaagtggcaccgagtcggtgcgaaggggctgcgtacaacacccgtcgcataacattgacgcgtctctacgtgggggcgcg

SEQ ID NO: 1030 - RNA, 155 nt, synthetic construct
  source 1..155: mol_type = other RNA
cttctccaatgcgacgggtggttttagagctagaaatagcaagttaaaataaggctagtccgttatcaacttgaaaaagtggcaccgagtcggtgctcgaaggggctgcgtacaacacccgtcgcaacattgacgcgtctctacgtgggggcgcg

SEQ ID NO: 1031 - RNA, 156 nt, synthetic construct
  source 1..156: mol_type = other RNA
cttctccaatgcgacgggtggttttagagctagaaatagcaagttaaaataaggctagtccgttatcaacttgaaaaagtggcaccgagtcggtgcgaaggggctgcgtaccacacccgtcgcattaacattgacgcgtctctacgtgggggcgcg

SEQ ID NO: 1032 - RNA, 156 nt, synthetic construct
  source 1..156: mol_type = other RNA
cttctccaatgcgacgggtggttttagagctagaaatagcaagttaaaataaggctagtccgttatcaacttgaaaaagtggcaccgagtcggtgctcgaaggggctgcgtaccacacccgtcgcaaacattgacgcgtctctacgtgggggcgcg

SEQ ID NO: 1033 - RNA, 156 nt, synthetic construct
  source 1..156: mol_type = other RNA
cttctccaatgcgacgggtggttttagagctagaaatagcaagttaaaataaggctagtccgttatcaacttgaaaaagtggcaccgagtcggtgcgaaggggctgcgtacgacacccgtcgcattaacattgacgcgtctctacgtgggggcgcg

SEQ ID NO: 1034 - RNA, 156 nt, synthetic construct
  source 1..156: mol_type = other RNA
cttctccaatgcgacgggtggttttagagctagaaatagcaagttaaaataaggctagtccgttatcaacttgaaaaagtggcaccgagtcggtgctcgaaggggctgcgtacgacacccgtcgcaaacattgacgcgtctctacgtgggggcgcg

SEQ ID NO: 1035 - RNA, 156 nt, synthetic construct
  source 1..156: mol_type = other RNA
cttctccaatgcgacgggtggttttagagctagaaatagcaagttaaaataaggctagtccgttatcaacttgaaaaagtggcaccgagtcggtgcgaaggggctgcgtactacacccgtcgcattaacattgacgcgtctctacgtgggggcgcg

SEQ ID NO: 1036 - RNA, 156 nt, synthetic construct
  source 1..156: mol_type = other RNA
cttctccaatgcgacgggtggttttagagctagaaatagcaagttaaaataaggctagtccgttatcaacttgaaaaagtggcaccgagtcggtgctcgaaggggctgcgtactacacccgtcgcaaacattgacgcgtctctacgtgggggcgcg

SEQ ID NO: 1037 - RNA, 156 nt, synthetic construct
  source 1..156: mol_type = other RNA
cttctccaatgcgacgggtggttttagagctagaaatagcaagttaaaataaggctagtccgttatcaacttgaaaaagtggcaccgagtcggtgcgaaggggctgcgtacaacacccgtcgcattaacattgacgcgtctctacgtgggggcgcg

SEQ ID NO: 1038 - RNA, 156 nt, synthetic construct
  source 1..156: mol_type = other RNA
cttctccaatgcgacgggtggttttagagctagaaatagcaagttaaaataaggctagtccgttatcaacttgaaaaagtggcaccgagtcggtgctcgaaggggctgcgtacaacacccgtcgcaaacattgacgcgtctctacgtgggggcgcg

SEQ ID NO: 1039 - RNA, 157 nt, synthetic construct
  source 1..157: mol_type = other RNA
cttctccaatgcgacgggtggttttagagctagaaatagcaagttaaaataaggctagtccgttatcaacttgaaaaagtggcaccgagtcggtgcgaaggggctgcgtacgacacccgtcgcattgaacattgacgcgtctctacgtgggggcgcg

SEQ ID NO: 1040 - RNA, 157 nt, synthetic construct
  source 1..157: mol_type = other RNA
cttctccaatgcgacgggtggttttagagctagaaatagcaagttaaaataaggctagtccgttatcaacttgaaaaagtggcaccgagtcggtgctcgaaggggctgcgtacgacacccgtcgcataacattgacgcgtctctacgtgggggcgcg

SEQ ID NO: 1041 - RNA, 157 nt, synthetic construct
  source 1..157: mol_type = other RNA
cttctccaatgcgacgggtggttttagagctagaaatagcaagttaaaataaggctagtccgttatcaacttgaaaaagtggcaccgagtcggtgcgaaggggctgcgtactacacccgtcgcattgaacattgacgcgtctctacgtgggggcgcg

SEQ ID NO: 1042 - RNA, 157 nt, synthetic construct
  source 1..157: mol_type = other RNA
cttctccaatgcgacgggtggttttagagctagaaatagcaagttaaaataaggctagtccgttatcaacttgaaaaagtggcaccgagtcggtgctcgaaggggctgcgtactacacccgtcgcataacattgacgcgtctctacgtgggggcgcg

SEQ ID NO: 1043 - RNA, 157 nt, synthetic construct
  source 1..157: mol_type = other RNA
cttctccaatgcgacgggtggttttagagctagaaatagcaagttaaaataaggctagtccgttatcaacttgaaaaagtggcaccgagtcggtgcgaaggggctgcgtaccacacccgtcgcattgaacattgacgcgtctctacgtgggggcgcg

SEQ ID NO: 1044 - RNA, 157 nt, synthetic construct
  source 1..157: mol_type = other RNA
cttctccaatgcgacgggtggttttagagctagaaatagcaagttaaaataaggctagtccgttatcaacttgaaaaagtggcaccgagtcggtgctcgaaggggctgcgtaccacacccgtcgcataacattgacgcgtctctacgtgggggcgcg

SEQ ID NO: 1045 - RNA, 157 nt, synthetic construct
  source 1..157: mol_type = other RNA
cttctccaatgcgacgggtggttttagagctagaaatagcaagttaaaataaggctagtccgttatcaacttgaaaaagtggcaccgagtcggtgcgaaggggctgcgtacaacacccgtcgcattgaacattgacgcgtctctacgtgggggcgcg

SEQ ID NO: 1046 - RNA, 157 nt, synthetic construct
  source 1..157: mol_type = other RNA
cttctccaatgcgacgggtggttttagagctagaaatagcaagttaaaataaggctagtccgttatcaacttgaaaaagtggcaccgagtcggtgctcgaaggggctgcgtacaacacccgtcgcataacattgacgcgtctctacgtgggggcgcg

SEQ ID NO: 1047 - RNA, 158 nt, synthetic construct
  source 1..158: mol_type = other RNA
cttctccaatgcgacgggtggttttagagctagaaatagcaagttaaaataaggctagtccgttatcaacttgaaaaagtggcaccgagtcggtgcgaaggggctgcgtaccacacccgtcgcattggaacattgacgcgtctctacgtgggggcgcg

SEQ ID NO: 1048 - RNA, 158 nt, synthetic construct
  source 1..158: mol_type = other RNA
cttctccaatgcgacgggtggttttagagctagaaatagcaagttaaaataaggctagtccgttatcaacttgaaaaagtggcaccgagtcggtgctcgaaggggctgcgtaccacacccgtcgcattaacattgacgcgtctctacgtgggggcgcg

SEQ ID NO: 1049 - RNA, 158 nt, synthetic construct
  source 1..158: mol_type = other RNA
cttctccaatgcgacgggtggttttagagctagaaatagcaagttaaaataaggctagtccgttatcaacttgaaaaagtggcaccgagtcggtgcactcgaaggggctgcgtaccacacccgtcgcaaacattgacgcgtctctacgtgggggcgcg

SEQ ID NO: 1050 - RNA, 158 nt, synthetic construct
  source 1..158: mol_type = other RNA
cttctccaatgcgacgggtggttttagagctagaaatagcaagttaaaataaggctagtccgttatcaacttgaaaaagtggcaccgagtcggtgcgaaggggctgcgtacgacacccgtcgcattggaacattgacgcgtctctacgtgggggcgcg

SEQ ID NO: 1051 - RNA, 158 nt, synthetic construct
  source 1..158: mol_type = other RNA
cttctccaatgcgacgggtggttttagagctagaaatagcaagttaaaataaggctagtccgttatcaacttgaaaaagtggcaccgagtcggtgctcgaaggggctgcgtacgacacccgtcgcattaacattgacgcgtctctacgtgggggcgcg

SEQ ID NO: 1052 - RNA, 158 nt, synthetic construct
  source 1..158: mol_type = other RNA
cttctccaatgcgacgggtggttttagagctagaaatagcaagttaaaataaggctagtccgttatcaacttgaaaaagtggcaccgagtcggtgcgaaggggctgcgtactacacccgtcgcattggaacattgacgcgtctctacgtgggggcgcg

SEQ ID NO: 1053 - RNA, 158 nt, synthetic construct
  source 1..158: mol_type = other RNA
cttctccaatgcgacgggtggttttagagctagaaatagcaagttaaaataaggctagtccgttatcaacttgaaaaagtggcaccgagtcggtgctcgaaggggctgcgtactacacccgtcgcattaacattgacgcgtctctacgtgggggcgcg

SEQ ID NO: 1054 - RNA, 158 nt, synthetic construct
  source 1..158: mol_type = other RNA
cttctccaatgcgacgggtggttttagagctagaaatagcaagttaaaataaggctagtccgttatcaacttgaaaaagtggcaccgagtcggtgcgaaggggctgcgtacaacacccgtcgcattggaacattgacgcgtctctacgtgggggcgcg

SEQ ID NO: 1055 - RNA, 158 nt, synthetic construct
  source 1..158: mol_type = other RNA
cttctccaatgcgacgggtggttttagagctagaaatagcaagttaaaataaggctagtccgttatcaacttgaaaaagtggcaccgagtcggtgctcgaaggggctgcgtacaacacccgtcgcattaacattgacgcgtctctacgtgggggcgcg

SEQ ID NO: 1056 - RNA, 159 nt, synthetic construct
  source 1..159: mol_type = other RNA
cttctccaatgcgacgggtggttttagagctagaaatagcaagttaaaataaggctagtccgttatcaacttgaaaaagtggcaccgagtcggtgcgaaggggctgcgtacgacacccgtcgcattggaaacattgacgcgtctctacgtgggggcgcg

SEQ ID NO: 1057 - RNA, 159 nt, synthetic construct
  source 1..159: mol_type = other RNA
cttctccaatgcgacgggtggttttagagctagaaatagcaagttaaaataaggctagtccgttatcaacttgaaaaagtggcaccgagtcggtgctcgaaggggctgcgtacgacacccgtcgcattgaacattgacgcgtctctacgtgggggcgcg

SEQ ID NO: 1058 - RNA, 159 nt, synthetic construct
  source 1..159: mol_type = other RNA
cttctccaatgcgacgggtggttttagagctagaaatagcaagttaaaataaggctagtccgttatcaacttgaaaaagtggcaccgagtcggtgcgaaggggctgcgtactacacccgtcgcattggaaacattgacgcgtctctacgtgggggcgcg

SEQ ID NO: 1059 - RNA, 159 nt, synthetic construct
  source 1..159: mol_type = other RNA
cttctccaatgcgacgggtggttttagagctagaaatagcaagttaaaataaggctagtccgttatcaacttgaaaaagtggcaccgagtcggtgctcgaaggggctgcgtactacacccgtcgcattgaacattgacgcgtctctacgtgggggcgcg

SEQ ID NO: 1060 - RNA, 159 nt, synthetic construct
  source 1..159: mol_type = other RNA
cttctccaatgcgacgggtggttttagagctagaaatagcaagttaaaataaggctagtccgttatcaacttgaaaaagtggcaccgagtcggtgcgaaggggctgcgtaccacacccgtcgcattggaaacattgacgcgtctctacgtgggggcgcg

SEQ ID NO: 1061 - RNA, 159 nt, synthetic construct
  source 1..159: mol_type = other RNA
cttctccaatgcgacgggtggttttagagctagaaatagcaagttaaaataaggctagtccgttatcaacttgaaaaagtggcaccgagtcggtgctcgaaggggctgcgtaccacacccgtcgcattgaacattgacgcgtctctacgtgggggcgcg

SEQ ID NO: 1062 - RNA, 159 nt, synthetic construct
  source 1..159: mol_type = other RNA
cttctccaatgcgacgggtggttttagagctagaaatagcaagttaaaataaggctagtccgttatcaacttgaaaaagtggcaccgagtcggtgcgaaggggctgcgtacaacacccgtcgcattggaaacattgacgcgtctctacgtgggggcgcg

SEQ ID NO: 1063 - RNA, 159 nt, synthetic construct
  source 1..159: mol_type = other RNA
cttctccaatgcgacgggtggttttagagctagaaatagcaagttaaaataaggctagtccgttatcaacttgaaaaagtggcaccgagtcggtgctcgaaggggctgcgtacaacacccgtcgcattgaacattgacgcgtctctacgtgggggcgcg

SEQ ID NO: 1064 - RNA, 160 nt, synthetic construct
  source 1..160: mol_type = other RNA
cttctccaatgcgacgggtggttttagagctagaaatagcaagttaaaataaggctagtccgttatcaacttgaaaaagtggcaccgagtcggtgcgaaggggctgcgtaccacacccgtcgcattggagaacattgacgcgtctctacgtgggggcgcg

SEQ ID NO: 1065 - RNA, 160 nt, synthetic construct
  source 1..160: mol_type = other RNA
cttctccaatgcgacgggtggttttagagctagaaatagcaagttaaaataaggctagtccgttatcaacttgaaaaagtggcaccgagtcggtgctcgaaggggctgcgtaccacacccgtcgcattggaacattgacgcgtctctacgtgggggcgcg

SEQ ID NO: 1066 - RNA, 160 nt, synthetic construct
  source 1..160: mol_type = other RNA
cttctccaatgcgacgggtggttttagagctagaaatagcaagttaaaataaggctagtccgttatcaacttgaaaaagtggcaccgagtcggtgcactcgaaggggctgcgtaccacacccgtcgcattaacattgacgcgtctctacgtgggggcgcg

SEQ ID NO: 1067 - RNA, 160 nt, synthetic construct
  source 1..160: mol_type = other RNA
cttctccaatgcgacgggtggttttagagctagaaatagcaagttaaaataaggctagtccgttatcaacttgaaaaagtggcaccgagtcggtgcgtactcgaaggggctgcgtaccacacccgtcgcaaacattgacgcgtctctacgtgggggcgcg

SEQ ID NO: 1068 - RNA, 160 nt, synthetic construct
  source 1..160: mol_type = other RNA
cttctccaatgcgacgggtggttttagagctagaaatagcaagttaaaataaggctagtccgttatcaacttgaaaaagtggcaccgagtcggtgcgaaggggctgcgtacgacacccgtcgcattggagaacattgacgcgtctctacgtgggggcgcg

SEQ ID NO: 1069 - RNA, 160 nt, synthetic construct
  source 1..160: mol_type = other RNA
cttctccaatgcgacgggtggttttagagctagaaatagcaagttaaaataaggctagtccgttatcaacttgaaaaagtggcaccgagtcggtgctcgaaggggctgcgtacgacacccgtcgcattggaacattgacgcgtctctacgtgggggcgcg

SEQ ID NO: 1070 - RNA, 160 nt, synthetic construct
  source 1..160: mol_type = other RNA
cttctccaatgcgacgggtggttttagagctagaaatagcaagttaaaataaggctagtccgttatcaacttgaaaaagtggcaccgagtcggtgcgaaggggctgcgtactacacccgtcgcattggagaacattgacgcgtctctacgtgggggcgcg

SEQ ID NO: 1071 - RNA, 160 nt, synthetic construct
  source 1..160: mol_type = other RNA
cttctccaatgcgacgggtggttttagagctagaaatagcaagttaaaataaggctagtccgttatcaacttgaaaaagtggcaccgagtcggtgctcgaaggggctgcgtactacacccgtcgcattggaacattgacgcgtctctacgtgggggcgcg

SEQ ID NO: 1072 - RNA, 160 nt, synthetic construct
  source 1..160: mol_type = other RNA
cttctccaatgcgacgggtggttttagagctagaaatagcaagttaaaataaggctagtccgttatcaacttgaaaaagtggcaccgagtcggtgcgaaggggctgcgtacaacacccgtcgcattggagaacattgacgcgtctctacgtgggggcgcg

SEQ ID NO: 1073 - RNA, 160 nt, synthetic construct
  source 1..160: mol_type = other RNA
cttctccaatgcgacgggtggttttagagctagaaatagcaagttaaaataaggctagtccgttatcaacttgaaaaagtggcaccgagtcggtgctcgaaggggctgcgtacaacacccgtcgcattggaacattgacgcgtctctacgtgggggcgcg

SEQ ID NO: 1074 - RNA, 161 nt, synthetic construct
  source 1..161: mol_type = other RNA
cttctccaatgcgacgggtggttttagagctagaaatagcaagttaaaataaggctagtccgttatcaacttgaaaaagtggcaccgagtcggtgcgaaggggctgcgtacgacacccgtcgcattggagaaacattgacgcgtctctacgtgggggcgcg

SEQ ID NO: 1075 - RNA, 161 nt, synthetic construct
  source 1..161: mol_type = other RNA
cttctccaatgcgacgggtggttttagagctagaaatagcaagttaaaataaggctagtccgttatcaacttgaaaaagtggcaccgagtcggtgctcgaaggggctgcgtacgacacccgtcgcattggaaacattgacgcgtctctacgtgggggcgcg

SEQ ID NO: 1076 - RNA, 161 nt, synthetic construct
  source 1..161: mol_type = other RNA
cttctccaatgcgacgggtggttttagagctagaaatagcaagttaaaataaggctagtccgttatcaacttgaaaaagtggcaccgagtcggtgcgaaggggctgcgtactacacccgtcgcattggagaaacattgacgcgtctctacgtgggggcgcg

SEQ ID NO: 1077 - RNA, 161 nt, synthetic construct
  source 1..161: mol_type = other RNA
cttctccaatgcgacgggtggttttagagctagaaatagcaagttaaaataaggctagtccgttatcaacttgaaaaagtggcaccgagtcggtgctcgaaggggctgcgtactacacccgtcgcattggaaacattgacgcgtctctacgtgggggcgcg

SEQ ID NO: 1078 - RNA, 161 nt, synthetic construct
  source 1..161: mol_type = other RNA
cttctccaatgcgacgggtggttttagagctagaaatagcaagttaaaataaggctagtccgttatcaacttgaaaaagtggcaccgagtcggtgcgaaggggctgcgtaccacacccgtcgcattggagaaacattgacgcgtctctacgtgggggcgcg

SEQ ID NO: 1079 - RNA, 161 nt, synthetic construct
  source 1..161: mol_type = other RNA
cttctccaatgcgacgggtggttttagagctagaaatagcaagttaaaataaggctagtccgttatcaacttgaaaaagtggcaccgagtcggtgctcgaaggggctgcgtaccacacccgtcgcattggaaacattgacgcgtctctacgtgggggcgcg

SEQ ID NO: 1080 - RNA, 161 nt, synthetic construct
  source 1..161: mol_type = other RNA
cttctccaatgcgacgggtggttttagagctagaaatagcaagttaaaataaggctagtccgttatcaacttgaaaaagtggcaccgagtcggtgcgaaggggctgcgtacaacacccgtcgcattggagaaacattgacgcgtctctacgtgggggcgcg

SEQ ID NO: 1081 - RNA, 161 nt, synthetic construct
  source 1..161: mol_type = other RNA
cttctccaatgcgacgggtggttttagagctagaaatagcaagttaaaataaggctagtccgttatcaacttgaaaaagtggcaccgagtcggtgctcgaaggggctgcgtacaacacccgtcgcattggaaacattgacgcgtctctacgtgggggcgcg

SEQ ID NO: 1082 - RNA, 162 nt, synthetic construct
  source 1..162: mol_type = other RNA
cttctccaatgcgacgggtggttttagagctagaaatagcaagttaaaataaggctagtccgttatcaacttgaaaaagtggcaccgagtcggtgctcgaaggggctgcgtaccacacccgtcgcattggagaacattgacgcgtctctacgtgggggcgcg

SEQ ID NO: 1083 - RNA, 162 nt, synthetic construct
  source 1..162: mol_type = other RNA
cttctccaatgcgacgggtggttttagagctagaaatagcaagttaaaataaggctagtccgttatcaacttgaaaaagtggcaccgagtcggtgcactcgaaggggctgcgtaccacacccgtcgcattggaacattgacgcgtctctacgtgggggcgcg

SEQ ID NO: 1084 - RNA, 162 nt, synthetic construct
  source 1..162: mol_type = other RNA
cttctccaatgcgacgggtggttttagagctagaaatagcaagttaaaataaggctagtccgttatcaacttgaaaaagtggcaccgagtcggtgcgtactcgaaggggctgcgtaccacacccgtcgcattaacattgacgcgtctctacgtgggggcgcg

SEQ ID NO: 1085 - RNA, 162 nt, synthetic construct
  source 1..162: mol_type = other RNA
cttctccaatgcgacgggtggttttagagctagaaatagcaagttaaaataaggctagtccgttatcaacttgaaaaagtggcaccgagtcggtgcgggtactcgaaggggctgcgtaccacacccgtcgcaaacattgacgcgtctctacgtgggggcgcg

SEQ ID NO: 1086 - RNA, 162 nt, synthetic construct
  source 1..162: mol_type = other RNA
cttctccaatgcgacgggtggttttagagctagaaatagcaagttaaaataaggctagtccgttatcaacttgaaaaagtggcaccgagtcggtgcgaaggggctgcgtacgacacccgtcgcattggagaaaacattgacgcgtctctacgtgggggcgcg

SEQ ID NO: 1087 - RNA, 162 nt, synthetic construct
  source 1..162: mol_type = other RNA
cttctccaatgcgacgggtggttttagagctagaaatagcaagttaaaataaggctagtccgttatcaacttgaaaaagtggcaccgagtcggtgctcgaaggggctgcgtacgacacccgtcgcattggagaacattgacgcgtctctacgtgggggcgcg

SEQ ID NO: 1088 - RNA, 162 nt, synthetic construct
  source 1..162: mol_type = other RNA
cttctccaatgcgacgggtggttttagagctagaaatagcaagttaaaataaggctagtccgttatcaacttgaaaaagtggcaccgagtcggtgcgaaggggctgcgtactacacccgtcgcattggagaaaacattgacgcgtctctacgtgggggcgcg

SEQ ID NO: 1089 - RNA, 162 nt, synthetic construct
  source 1..162: mol_type = other RNA
cttctccaatgcgacgggtggttttagagctagaaatagcaagttaaaataaggctagtccgttatcaacttgaaaaagtggcaccgagtcggtgctcgaaggggctgcgtactacacccgtcgcattggagaacattgacgcgtctctacgtgggggcgcg

SEQ ID NO: 1090 - RNA, 162 nt, synthetic construct
  source 1..162: mol_type = other RNA
cttctccaatgcgacgggtggttttagagctagaaatagcaagttaaaataaggctagtccgttatcaacttgaaaaagtggcaccgagtcggtgcgaaggggctgcgtaccacacccgtcgcattggagaaaacattgacgcgtctctacgtgggggcgcg

SEQ ID NO: 1091 - RNA, 162 nt, synthetic construct
  source 1..162: mol_type = other RNA
cttctccaatgcgacgggtggttttagagctagaaatagcaagttaaaataaggctagtccgttatcaacttgaaaaagtggcaccgagtcggtgcgaaggggctgcgtacaacacccgtcgcattggagaaaacattgacgcgtctctacgtgggggcgcg

SEQ ID NO: 1092 - RNA, 162 nt, synthetic construct
  source 1..162: mol_type = other RNA
cttctccaatgcgacgggtggttttagagctagaaatagcaagttaaaataaggctagtccgttatcaacttgaaaaagtggcaccgagtcggtgctcgaaggggctgcgtacaacacccgtcgcattggagaacattgacgcgtctctacgtgggggcgcg

SEQ ID NO: 1093 - RNA, 162 nt, synthetic construct
  source 1..162: mol_type = other RNA
gcttctccaatgcgacgggtggttttagagctagaaatagcaagttaaaataaggctagtccgttatcaacttgaaaaagtggcaccgagtcggtgcgaaggggctgcgtactacacccgtcgcaaacattgacgcgtctctacgtgggggcgcgttttttt

SEQ ID NO: 1094 - RNA, 163 nt, synthetic construct
  source 1..163: mol_type = other RNA
cttctccaatgcgacgggtggttttagagctagaaatagcaagttaaaataaggctagtccgttatcaacttgaaaaagtggcaccgagtcggtgctcgaaggggctgcgtacgacacccgtcgcattggagaaacattgacgcgtctctacgtgggggcgcg

SEQ ID NO: 1095 - RNA, 163 nt, synthetic construct
  source 1..163: mol_type = other RNA
cttctccaatgcgacgggtggttttagagctagaaatagcaagttaaaataaggctagtccgttatcaacttgaaaaagtggcaccgagtcggtgctcgaaggggctgcgtactacacccgtcgcattggagaaacattgacgcgtctctacgtgggggcgcg

SEQ ID NO: 1096 - RNA, 163 nt, synthetic construct
  source 1..163: mol_type = other RNA
cttctccaatgcgacgggtggttttagagctagaaatagcaagttaaaataaggctagtccgttatcaacttgaaaaagtggcaccgagtcggtgctcgaaggggctgcgtaccacacccgtcgcattggagaaacattgacgcgtctctacgtgggggcgcg

SEQ ID NO: 1097 - RNA, 163 nt, synthetic construct
  source 1..163: mol_type = other RNA
cttctccaatgcgacgggtggttttagagctagaaatagcaagttaaaataaggctagtccgttatcaacttgaaaaagtggcaccgagtcggtgctcgaaggggctgcgtacaacacccgtcgcattggagaaacattgacgcgtctctacgtgggggcgcg

SEQ ID NO: 1098 - RNA, 163 nt, synthetic construct
  source 1..163: mol_type = other RNA
gcttctccaatgcgacgggtggttttagagctagaaatagcaagttaaaataaggctagtccgttatcaacttgaaaaagtggcaccgagtcggtgcgaaggggctgcgtactacacccgtcgcataacattgacgcgtctctacgtgggggcgcgttttttt

SEQ ID NO: 1099 - RNA, 164 nt, synthetic construct
  source 1..164: mol_type = other RNA
cttctccaatgcgacgggtggttttagagctagaaatagcaagttaaaataaggctagtccgttatcaacttgaaaaagtggcaccgagtcggtgcactcgaaggggctgcgtaccacacccgtcgcattggagaacattgacgcgtctctacgtgggggcgcg

SEQ ID NO: 1100 - RNA, 164 nt, synthetic construct
  source 1..164: mol_type = other RNA
cttctccaatgcgacgggtggttttagagctagaaatagcaagttaaaataaggctagtccgttatcaacttgaaaaagtggcaccgagtcggtgcgtactcgaaggggctgcgtaccacacccgtcgcattggaacattgacgcgtctctacgtgggggcgcg

SEQ ID NO: 1101 - RNA, 164 nt, synthetic construct
  source 1..164: mol_type = other RNA
cttctccaatgcgacgggtggttttagagctagaaatagcaagttaaaataaggctagtccgttatcaacttgaaaaagtggcaccgagtcggtgcgggtactcgaaggggctgcgtaccacacccgtcgcattaacattgacgcgtctctacgtgggggcgcg

SEQ ID NO: 1102 - RNA, 164 nt, synthetic construct
  source 1..164: mol_type = other RNA
cttctccaatgcgacgggtggttttagagctagaaatagcaagttaaaataaggctagtccgttatcaacttgaaaaagtggcaccgagtcggtgcgtgggtactcgaaggggctgcgtaccacacccgtcgcaaacattgacgcgtctctacgtgggggcgcg

SEQ ID NO: 1103 - RNA, 164 nt, synthetic construct
  source 1..164: mol_type = other RNA
cttctccaatgcgacgggtggttttagagctagaaatagcaagttaaaataaggctagtccgttatcaacttgaaaaagtggcaccgagtcggtgctcgaaggggctgcgtacgacacccgtcgcattggagaaaacattgacgcgtctctacgtgggggcgcg

SEQ ID NO: 1104 - RNA, 164 nt, synthetic construct
  source 1..164: mol_type = other RNA
cttctccaatgcgacgggtggttttagagctagaaatagcaagttaaaataaggctagtccgttatcaacttgaaaaagtggcaccgagtcggtgctcgaaggggctgcgtactacacccgtcgcattggagaaaacattgacgcgtctctacgtgggggcgcg

SEQ ID NO: 1105 - RNA, 164 nt, synthetic construct
  source 1..164: mol_type = other RNA
cttctccaatgcgacgggtggttttagagctagaaatagcaagttaaaataaggctagtccgttatcaacttgaaaaagtggcaccgagtcggtgctcgaaggggctgcgtaccacacccgtcgcattggagaaaacattgacgcgtctctacgtgggggcgcg

SEQ ID NO: 1106 - RNA, 164 nt, synthetic construct
  source 1..164: mol_type = other RNA
cttctccaatgcgacgggtggttttagagctagaaatagcaagttaaaataaggctagtccgttatcaacttgaaaaagtggcaccgagtcggtgctcgaaggggctgcgtacaacacccgtcgcattggagaaaacattgacgcgtctctacgtgggggcgcg

SEQ ID NO: 1107 - RNA, 164 nt, synthetic construct
  source 1..164: mol_type = other RNA
gcttctccaatgcgacgggtggttttagagctagaaatagcaagttaaaataaggctagtccgttatcaacttgaaaaagtggcaccgagtcggtgctcgaaggggctgcgtactacacccgtcgcaaacattgacgcgtctctacgtgggggcgcgttttttt

SEQ ID NO: 1108 - RNA, 166 nt, synthetic construct
  source 1..166: mol_type = other RNA
gcttctccaatgcgacgggtggttttagagctagaaatagcaagttaaaataaggctagtccgttatcaacttgaaaaagtggcaccgagtcggtgctcgaaggggctgcgtacgacacccgtcgcattggtaccatcgggtctctacgtgggggcccgttttttt

SEQ ID NO: 1109 - RNA, 166 nt, synthetic construct
  source 1..166: mol_type = other RNA
gcttctccaatgcgacgggtggtttaagagctagaaatagcaagtttaaataaggctagtccgttatcaacttgaaaaagtggcaccgagtcggtgctcgaaggggctgcgtacgacacccgtcgcattggtaccatcgggtctctacgtgggggcccgttttttt

SEQ ID NO: 1110 - RNA, 166 nt, synthetic construct
  source 1..166: mol_type = other RNA
gcttctccaatgcgacgggtggtttaagagctagaaatagcaagtttaaataaggctagtccgttatcagcgtgaaaacgcggcaccgagtcggtgctcgaaggggctgcgtacgacacccgtcgcattggtaccatcgggtctctacgtgggggcccgttttttt

SEQ ID NO: 1111 - RNA, 166 nt, synthetic construct
  source 1..166: mol_type = other RNA
gcttctccaatgcgacgggtggttttagagctagaaatagcaagttaaaataaggctagtccgttatcaacttgaaaaagtggcaccgagtcggtgctcgaaggggctgcgtacgacacccgtcgcattggtattctcgggtctctacgtgggggcccgttttttt

SEQ ID NO: 1112 - RNA, 166 nt, synthetic construct
  source 1..166: mol_type = other RNA
gcttctccaatgcgacgggtggtttaagagctagaaatagcaagtttaaataaggctagtccgttatcaacttgaaaaagtggcaccgagtcggtgctcgaaggggctgcgtacgacacccgtcgcattggtattctcgggtctctacgtgggggcccgttttttt

SEQ ID NO: 1113 - RNA, 166 nt, synthetic construct
  source 1..166: mol_type = other RNA
gcttctccaatgcgacgggtggtttaagagctagaaatagcaagtttaaataaggctagtccgttatcagcgtgaaaacgcggcaccgagtcggtgctcgaaggggctgcgtacgacacccgtcgcattggtattctcgggtctctacgtgggggcccgttttttt

SEQ ID NO: 1114 - RNA, 166 nt, synthetic construct
  source 1..166: mol_type = other RNA
gcttctccaatgcgacgggtggttttagagctagaaatagcaagttaaaataaggctagtccgttatcaacttgaaaaagtggcaccgagtcggtgctcgaaggggctgcgtacgacacccgtcgcattggttaatcgcggcaccgtccgcccaaacggttttttt

SEQ ID NO: 1115 - RNA, 166 nt, synthetic construct
  source 1..166: mol_type = other RNA
gcttctccaatgcgacgggtggtttaagagctagaaatagcaagtttaaataaggctagtccgttatcaacttgaaaaagtggcaccgagtcggtgctcgaaggggctgcgtacgacacccgtcgcattggttaatcgcggcaccgtccgcccaaacggttttttt

SEQ ID NO: 1116 - RNA, 166 nt, synthetic construct
  source 1..166: mol_type = other RNA
gcttctccaatgcgacgggtggtttaagagctagaaatagcaagtttaaataaggctagtccgttatcagcgtgaaaacgcggcaccgagtcggtgctcgaaggggctgcgtacgacacccgtcgcattggttaatcgcggcaccgtccgcccaaacggttttttt

SEQ ID NO: 1117 - RNA, 166 nt, synthetic construct
  source 1..166: mol_type = other RNA
gcttctccaatgcgacgggtggttttagagctagaaatagcaagttaaaataaggctagtccgttatcaacttgaaaaagtggcaccgagtcggtgctcgaaggggctgcgtacgacacccgtcgcattggttatctgcggcaccgtccgcccaaacggttttttt

SEQ ID NO: 1118 - RNA, 166 nt, synthetic construct
  source 1..166: mol_type = other RNA
gcttctccaatgcgacgggtggtttaagagctagaaatagcaagtttaaataaggctagtccgttatcaacttgaaaaagtggcaccgagtcggtgctcgaaggggctgcgtacgacacccgtcgcattggttatctgcggcaccgtccgcccaaacggttttttt

SEQ ID NO: 1119 - RNA, 166 nt, synthetic construct
  source 1..166: mol_type = other RNA
gcttctccaatgcgacgggtggtttaagagctagaaatagcaagtttaaataaggctagtccgttatcagcgtgaaaacgcggcaccgagtcggtgctcgaaggggctgcgtacgacacccgtcgcattggttatctgcggcaccgtccgcccaaacggttttttt

SEQ ID NO: 1120 - RNA, 165 nt, synthetic construct
  source 1..165: mol_type = other RNA
gcttctccaatgcgacgggtggttttagagctagaaatagcaagttaaaataaggctagtccgttatcaacttgaaaaagtggcaccgagtcggtgctcgaaggggctgcgtacgacacccgtcgcataacattgacgcgtctctacgtgggggcgcgttttttt

SEQ ID NO: 1121 - RNA, 166 nt, synthetic construct
  source 1..166: mol_type = other RNA
cttctccaatgcgacgggtggttttagagctagaaatagcaagttaaaataaggctagtccgttatcaacttgaaaaagtggcaccgagtcggtgcgtactcgaaggggctgcgtaccacacccgtcgcattggagaacattgacgcgtctctacgtgggggcgcg

SEQ ID NO: 1122 - RNA, 166 nt, synthetic construct
  source 1..166: mol_type = other RNA
cttctccaatgcgacgggtggttttagagctagaaatagcaagttaaaataaggctagtccgttatcaacttgaaaaagtggcaccgagtcggtgcgggtactcgaaggggctgcgtaccacacccgtcgcattggaacattgacgcgtctctacgtgggggcgcg

SEQ ID NO: 1123 - RNA, 166 nt, synthetic construct
  source 1..166: mol_type = other RNA
cttctccaatgcgacgggtggttttagagctagaaatagcaagttaaaataaggctagtccgttatcaacttgaaaaagtggcaccgagtcggtgcgtgggtactcgaaggggctgcgtaccacacccgtcgcattaacattgacgcgtctctacgtgggggcgcg

SEQ ID NO: 1124 - RNA, 166 nt, synthetic construct
  source 1..166: mol_type = other RNA
gcttctccaatgcgacgggtggttttagagctagaaatagcaagttaaaataaggctagtccgttatcaacttgaaaaagtggcaccgagtcggtgctcgaaggggctgcgtactacacccgtcgcattaacattgacgcgtctctacgtgggggcgcgttttttt

SEQ ID NO: 1125 - RNA, 166 nt, synthetic construct
  source 1..166: mol_type = other RNA
gcttctccaatgcgacgggtggttttagagctagaaatagcaagttaaaataaggctagtccgttatcaacttgaaaaagtggcaccgagtcggtgcgaaggggctgcgtactacacccgtcgcattggaacattgacgcgtctctacgtgggggcgcgttttttt

SEQ ID NO: 1126 - RNA, 168 nt, synthetic construct
  source 1..168: mol_type = other RNA
gcttctccaatgcgacgggtggtttaagagcggggaaatccgcaagtttaaataaggctagtccgttatcagcgtgaaaacgcggcaccgagtcggtgctcgaaggggctgcgtacgacacccgtcgcattggtaccatcgggtctctacgtgggggcccgttttttt

SEQ ID NO: 1127 - RNA, 168 nt, synthetic construct
  source 1..168: mol_type = other RNA
gcttctccaatgcgacgggtggtttaagagcggggaaatccgcaagtttaaataaggctagtccgttatcagcgtgaaaacgcggcaccgagtcggtgctcgaaggggctgcgtacgacacccgtcgcattggtattctcgggtctctacgtgggggcccgttttttt

SEQ ID NO: 1128 - RNA, 168 nt, synthetic construct
  source 1..168: mol_type = other RNA
gcttctccaatgcgacgggtggtttaagagcggggaaatccgcaagtttaaataaggctagtccgttatcagcgtgaaaacgcggcaccgagtcggtgctcgaaggggctgcgtacgacacccgtcgcattggttaatcgcggcaccgtccgcccaaacggttttttt

SEQ ID NO: 1129 - RNA, 168 nt, synthetic construct
  source 1..168: mol_type = other RNA
gcttctccaatgcgacgggtggtttaagagcggggaaatccgcaagtttaaataaggctagtccgttatcagcgtgaaaacgcggcaccgagtcggtgctcgaaggggctgcgtacgacacccgtcgcattggttatctgcggcaccgtccgcccaaacggttttttt

SEQ ID NO: 1130 - RNA, 167 nt, synthetic construct
  source 1..167: mol_type = other RNA
gcttctccaatgcgacgggtggttttagagctagaaatagcaagttaaaataaggctagtccgttatcaacttgaaaaagtggcaccgagtcggtgctcgaaggggctgcgtactacacccgtcgcattgaacattgacgcgtctctacgtgggggcgcgttttttt

SEQ ID NO: 1131 - RNA, 168 nt, synthetic construct
  source 1..168: mol_type = other RNA
cttctccaatgcgacgggtggttttagagctagaaatagcaagttaaaataaggctagtccgttatcaacttgaaaaagtggcaccgagtcggtgcgggtactcgaaggggctgcgtaccacacccgtcgcattggagaacattgacgcgtctctacgtgggggcgcg

SEQ ID NO: 1132 - RNA, 168 nt, synthetic construct
  source 1..168: mol_type = other RNA
cttctccaatgcgacgggtggttttagagctagaaatagcaagttaaaataaggctagtccgttatcaacttgaaaaagtggcaccgagtcggtgcgtgggtactcgaaggggctgcgtaccacacccgtcgcattggaacattgacgcgtctctacgtgggggcgcg

SEQ ID NO: 1133 - RNA, 168 nt, synthetic construct
  source 1..168: mol_type = other RNA
gcttctccaatgcgacgggtggttttagagctagaaatagcaagttaaaataaggctagtccgttatcaacttgaaaaagtggcaccgagtcggtgctcgaaggggctgcgtacgacacccgtcgcattggaacattgacgcgtctctacgtgggggcgcgttttttt

SEQ ID NO: 1134 - RNA, 169 nt, synthetic construct
  source 1..169: mol_type = other RNA
gcttctccaatgcgacgggtggttttagagctagaaatagcaagttaaaataaggctagtccgttatcaacttgaaaaagtggcaccgagtcggtgctcgaaggggctgcgtactacacccgtcgcattggaaacattgacgcgtctctacgtgggggcgcgttttttt

SEQ ID NO: 1135 - RNA, 170 nt, synthetic construct
  source 1..170: mol_type = other RNA
cttctccaatgcgacgggtggttttagagctagaaatagcaagttaaaataaggctagtccgttatcaacttgaaaaagtggcaccgagtcggtgcgtgggtactcgaaggggctgcgtaccacacccgtcgcattggagaacattgacgcgtctctacgtgggggcgcg

SEQ ID NO: 1136 - RNA, 172 nt, synthetic construct
  source 1..172: mol_type = other RNA
gcttctccaatgcgacgggtggttttagagctagaaatagcaagttaaaataaggctagtccgttatcaacttgaaaaagtggcaccgagtcggtgctcgaaggggctgcgtacgacacccgtcgcattggagaaaacattgacgcgtctctacgtgggggcgcgttttttt

SEQ ID NO: 1137 - RNA, 176 nt, synthetic construct
  source 1..176: mol_type = other RNA
gcttctccaatgcgacgggtggtttaagagctatgctggaaacagcatagcaagtttaaataaggctagtccgttatcaacttgaaaaagtggcaccgagtcggtgctcgaaggggctgcgtacgacacccgtcgcattggtaccatcgggtctctacgtgggggcccgttttttt

SEQ ID NO: 1138 - RNA, 176 nt, synthetic construct
  source 1..176: mol_type = other RNA
gcttctccaatgcgacgggtggtttaagagctatgctggaaacagcatagcaagtttaaataaggctagtccgttatcagcgtgaaaacgcggcaccgagtcggtgctcgaaggggctgcgtacgacacccgtcgcattggtaccatcgggtctctacgtgggggcccgttttttt

SEQ ID NO: 1139 - RNA, 176 nt, synthetic construct
  source 1..176: mol_type = other RNA
gcttctccaatgcgacgggtggtttaagagctatgctggaaacagcatagcaagtttaaataaggctagtccgttatcaacttgaaaaagtggcaccgagtcggtgctcgaaggggctgcgtacgacacccgtcgcattggtattctcgggtctctacgtgggggcccgttttttt

SEQ ID NO: 1140 - RNA, 176 nt, synthetic construct
  source 1..176: mol_type = other RNA
gcttctccaatgcgacgggtggtttaagagctatgctggaaacagcatagcaagtttaaataaggctagtccgttatcagcgtgaaaacgcggcaccgagtcggtgctcgaaggggctgcgtacgacacccgtcgcattggtattctcgggtctctacgtgggggcccgttttttt

SEQ ID NO: 1141 - RNA, 176 nt, synthetic construct
  source 1..176: mol_type = other RNA
gcttctccaatgcgacgggtggtttaagagctatgctggaaacagcatagcaagtttaaataaggctagtccgttatcaacttgaaaaagtggcaccgagtcggtgctcgaaggggctgcgtacgacacccgtcgcattggttaatcgcggcaccgtccgcccaaacggttttttt

SEQ ID NO: 1142 - RNA, 176 nt, synthetic construct
  source 1..176: mol_type = other RNA
gcttctccaatgcgacgggtggtttaagagctatgctggaaacagcatagcaagtttaaataaggctagtccgttatcagcgtgaaaacgcggcaccgagtcggtgctcgaaggggctgcgtacgacacccgtcgcattggttaatcgcggcaccgtccgcccaaacggttttttt

SEQ ID NO: 1143 - RNA, 176 nt, synthetic construct
  source 1..176: mol_type = other RNA
gcttctccaatgcgacgggtggtttaagagctatgctggaaacagcatagcaagtttaaataaggctagtccgttatcaacttgaaaaagtggcaccgagtcggtgctcgaaggggctgcgtacgacacccgtcgcattggttatctgcggcaccgtccgcccaaacggttttttt

SEQ ID NO: 1144 - RNA, 176 nt, synthetic construct
  source 1..176: mol_type = other RNA
gcttctccaatgcgacgggtggtttaagagctatgctggaaacagcatagcaagtttaaataaggctagtccgttatcagcgtgaaaacgcggcaccgagtcggtgctcgaaggggctgcgtacgacacccgtcgcattggttatctgcggcaccgtccgcccaaacggttttttt

SEQ ID NO: 1145 - RNA, 181 nt, synthetic construct
  source 1..181: mol_type = other RNA
gcttctccaatgcgacgggtggttttagagctagaaatagcaagttaaaataaggctagtccgttatcaacttgaaaaagtggcaccgagtcggtgctcgaaggggctgcgtacgacacccgtcgcattggccagctcgcggttctatctagttacgcgttaaaccaactagaattttttt

SEQ ID NO: 1146 - RNA, 181 nt, synthetic construct
  source 1..181: mol_type = other RNA
gcttctccaatgcgacgggtggtttaagagctagaaatagcaagtttaaataaggctagtccgttatcaacttgaaaaagtggcaccgagtcggtgctcgaaggggctgcgtacgacacccgtcgcattggccagctcgcggttctatctagttacgcgttaaaccaactagaattttttt

SEQ ID NO: 1147 - RNA, 181 nt, synthetic construct
  source 1..181: mol_type = other RNA
gcttctccaatgcgacgggtggtttaagagctagaaatagcaagtttaaataaggctagtccgttatcagcgtgaaaacgcggcaccgagtcggtgctcgaaggggctgcgtacgacacccgtcgcattggccagctcgcggttctatctagttacgcgttaaaccaactagaattttttt

SEQ ID NO: 1148 - RNA, 181 nt, synthetic construct
  source 1..181: mol_type = other RNA
gcttctccaatgcgacgggtggttttagagctagaaatagcaagttaaaataaggctagtccgttatcaacttgaaaaagtggcaccgagtcggtgctcgaaggggctgcgtacgacacccgtcgcattggcctgcccgcggttctatctagttacgcgttaaaccaactagaattttttt

SEQ ID NO: 1149 - RNA, 181 nt, synthetic construct
  source 1..181: mol_type = other RNA
gcttctccaatgcgacgggtggtttaagagctagaaatagcaagtttaaataaggctagtccgttatcaacttgaaaaagtggcaccgagtcggtgctcgaaggggctgcgtacgacacccgtcgcattggcctgcccgcggttctatctagttacgcgttaaaccaactagaattttttt

SEQ ID NO: 1150 - RNA, 181 nt, synthetic construct
  source 1..181: mol_type = other RNA
gcttctccaatgcgacgggtggtttaagagctagaaatagcaagtttaaataaggctagtccgttatcagcgtgaaaacgcggcaccgagtcggtgctcgaaggggctgcgtacgacacccgtcgcattggcctgcccgcggttctatctagttacgcgttaaaccaactagaattttttt

SEQ ID NO: 1151 - RNA, 183 nt, synthetic construct
  source 1..183: mol_type = other RNA
gcttctccaatgcgacgggtggtttaagagcggggaaatccgcaagtttaaataaggctagtccgttatcagcgtgaaaacgcggcaccgagtcggtgctcgaaggggctgcgtacgacacccgtcgcattggccagctcgcggttctatctagttacgcgttaaaccaactagaattttttt

SEQ ID NO: 1152 - RNA, 183 nt, synthetic construct
  source 1..183: mol_type = other RNA
gcttctccaatgcgacgggtggtttaagagcggggaaatccgcaagtttaaataaggctagtccgttatcagcgtgaaaacgcggcaccgagtcggtgctcgaaggggctgcgtacgacacccgtcgcattggcctgcccgcggttctatctagttacgcgttaaaccaactagaattttttt

SEQ ID NO: 1153 - RNA, 191 nt, synthetic construct
  source 1..191: mol_type = other RNA
gcttctccaatgcgacgggtggtttaagagctatgctggaaacagcatagcaagtttaaataaggctagtccgttatcaacttgaaaaagtggcaccgagtcggtgctcgaaggggctgcgtacgacacccgtcgcattggccagctcgcggttctatctagttacgcgttaaaccaactagaattttttt

SEQ ID NO: 1154 - RNA, 191 nt, synthetic construct
  source 1..191: mol_type = other RNA
gcttctccaatgcgacgggtggtttaagagctatgctggaaacagcatagcaagtttaaataaggctagtccgttatcagcgtgaaaacgcggcaccgagtcggtgctcgaaggggctgcgtacgacacccgtcgcattggccagctcgcggttctatctagttacgcgttaaaccaactagaattttttt

SEQ ID NO: 1155 - RNA, 191 nt, synthetic construct
  source 1..191: mol_type = other RNA
gcttctccaatgcgacgggtggtttaagagctatgctggaaacagcatagcaagtttaaataaggctagtccgttatcaacttgaaaaagtggcaccgagtcggtgctcgaaggggctgcgtacgacacccgtcgcattggcctgcccgcggttctatctagttacgcgttaaaccaactagaattttttt

SEQ ID NO: 1156 - RNA, 191 nt, synthetic construct
  source 1..191: mol_type = other RNA
gcttctccaatgcgacgggtggtttaagagctatgctggaaacagcatagcaagtttaaataaggctagtccgttatcagcgtgaaaacgcggcaccgagtcggtgctcgaaggggctgcgtacgacacccgtcgcattggcctgcccgcggttctatctagttacgcgttaaaccaactagaattttttt

SEQ ID NO: 1157 - RNA, 96 nt, synthetic construct
  source 1..96: mol_type = other RNA
gcgtaccacacccgtcgcatgttttagagctagaaatagcaagttaaaataaggctagtccgttatcaacttgaaaaagtggcaccgagtcggtgc

SEQ ID NO: 1158 - RNA, 96 nt, synthetic construct
  source 1..96: mol_type = other RNA
gcgtactacacccgtcgcatgttttagagctagaaatagcaagttaaaataaggctagtccgttatcaacttgaaaaagtggcaccgagtcggtgc

SEQ ID NO: 1159 - RNA, 96 nt, synthetic construct
  source 1..96: mol_type = other RNA
gcgtacgacacccgtcgcatgttttagagctagaaatagcaagttaaaataaggctagtccgttatcaacttgaaaaagtggcaccgagtcggtgc

SEQ ID NO: 1160 - RNA, 96 nt, synthetic construct
  source 1..96: mol_type = other RNA
gcgtacaacacccgtcgcatgttttagagctagaaatagcaagttaaaataaggctagtccgttatcaacttgaaaaagtggcaccgagtcggtgc

SEQ ID NO: 1161 - RNA, 96 nt, synthetic construct
  source 1..96: mol_type = other RNA
agtactgtgggtactcgaaggttttagagctagaaatagcaagttaaaataaggctagtccgttatcaacttgaaaaagtggcaccgagtcggtgc

SEQ ID NO: 1162 - RNA, 96 nt, synthetic construct
  source 1..96: mol_type = other RNA
gctcagccaggtagtactgtgttttagagctagaaatagcaagttaaaataaggctagtccgttatcaacttgaaaaagtggcaccgagtcggtgc

SEQ ID NO: 1163 - RNA, 96 nt, synthetic construct
  source 1..96: mol_type = other RNA
ggctcagccaggtagtactggttttagagctagaaatagcaagttaaaataaggctagtccgttatcaacttgaaaaagtggcaccgagtcggtgc

SEQ ID NO: 1164 - RNA, 96 nt, synthetic construct
  source 1..96: mol_type = other RNA
agaactgccatggctcagccgttttagagctagaaatagcaagttaaaataaggctagtccgttatcaacttgaaaaagtggcaccgagtcggtgc

SEQ ID NO: 1165 - RNA, 96 nt, synthetic construct
  source 1..96: mol_type = other RNA
gccagcatggagaactgccagttttagagctagaaatagcaagttaaaataaggctagtccgttatcaacttgaaaaagtggcaccgagtcggtgc

SEQ ID NO: 1166 - RNA, 96 nt, synthetic construct
  source 1..96: mol_type = other RNA
aaacatgtaggcggccagcagttttagagctagaaatagcaagttaaaataaggctagtccgttatcaacttgaaaaagtggcaccgagtcggtgc

SEQ ID NO: 1167 - RNA, 96 nt, synthetic construct
  source 1..96: mol_type = other RNA
gatcagcagaaacatgtagggttttagagctagaaatagcaagttaaaataaggctagtccgttatcaacttgaaaaagtggcaccgagtcggtgc

SEQ ID NO: 1168 - RNA, 96 nt, synthetic construct
  source 1..96: mol_type = other RNA
cacgatcagcagaaacatgtgttttagagctagaaatagcaagttaaaataaggctagtccgttatcaacttgaaaaagtggcaccgagtcggtgc

SEQ ID NO: 1169 - RNA, 96 nt, synthetic construct
  source 1..96: mol_type = other RNA
agagcgtgaggaagttgatggttttagagctagaaatagcaagttaaaataaggctagtccgttatcaacttgaaaaagtggcaccgagtcggtgc

SEQ ID NO: 1170 - RNA, 97 nt, synthetic construct
  source 1..97: mol_type = other RNA
gagaactgccatggctcagccgttttagagctagaaatagcaagttaaaataaggctagtccgttatcaacttgaaaaagtggcaccgagtcggtgc

SEQ ID NO: 1171 - RNA, 126 nt, synthetic construct
  source 1..126: mol_type = other RNA
gcgtaccacacccgtcgcatgttttagagctagaaatagcaagttaaaataaggctagtccgttatcaacttgaaaaagtggcaccgagtcggtgcaacattgacgcgtctctacgtgggggcgcg

SEQ ID NO: 1172 - RNA, 126 nt, synthetic construct
  source 1..126: mol_type = other RNA
gcgtactacacccgtcgcatgttttagagctagaaatagcaagttaaaataaggctagtccgttatcaacttgaaaaagtggcaccgagtcggtgcaacattgacgcgtctctacgtgggggcgcg

SEQ ID NO: 1173 - RNA, 126 nt, synthetic construct
  source 1..126: mol_type = other RNA
gcgtacgacacccgtcgcatgttttagagctagaaatagcaagttaaaataaggctagtccgttatcaacttgaaaaagtggcaccgagtcggtgcaacattgacgcgtctctacgtgggggcgcg

SEQ ID NO: 1174 - RNA, 126 nt, synthetic construct
  source 1..126: mol_type = other RNA
gcgtacaacacccgtcgcatgttttagagctagaaatagcaagttaaaataaggctagtccgttatcaacttgaaaaagtggcaccgagtcggtgcaacattgacgcgtctctacgtgggggcgcg

SEQ ID NO: 1175 - RNA, 126 nt, synthetic construct
  source 1..126: mol_type = other RNA
agtactgtgggtactcgaaggttttagagctagaaatagcaagttaaaataaggctagtccgttatcaacttgaaaaagtggcaccgagtcggtgcaacattgacgcgtctctacgtgggggcgcg

SEQ ID NO: 1176 - RNA, 126 nt, synthetic construct
  source 1..126: mol_type = other RNA
gctcagccaggtagtactgtgttttagagctagaaatagcaagttaaaataaggctagtccgttatcaacttgaaaaagtggcaccgagtcggtgcaacattgacgcgtctctacgtgggggcgcg

SEQ ID NO: 1177 - RNA, 126 nt, synthetic construct
  source 1..126: mol_type = other RNA
ggctcagccaggtagtactggttttagagctagaaatagcaagttaaaataaggctagtccgttatcaacttgaaaaagtggcaccgagtcggtgcaacattgacgcgtctctacgtgggggcgcg

SEQ ID NO: 1178 - RNA, 126 nt, synthetic construct
  source 1..126: mol_type = other RNA
agaactgccatggctcagccgttttagagctagaaatagcaagttaaaataaggctagtccgttatcaacttgaaaaagtggcaccgagtcggtgcaacattgacgcgtctctacgtgggggcgcg

SEQ ID NO: 1179 - RNA, 126 nt, synthetic construct
  source 1..126: mol_type = other RNA
gccagcatggagaactgccagttttagagctagaaatagcaagttaaaataaggctagtccgttatcaacttgaaaaagtggcaccgagtcggtgcaacattgacgcgtctctacgtgggggcgcg

SEQ ID NO: 1180 - RNA, 126 nt, synthetic construct
  source 1..126: mol_type = other RNA
aaacatgtaggcggccagcagttttagagctagaaatagcaagttaaaataaggctagtccgttatcaacttgaaaaagtggcaccgagtcggtgcaacattgacgcgtctctacgtgggggcgcg

SEQ ID NO: 1181 - RNA, 126 nt, synthetic construct
  source 1..126: mol_type = other RNA
gatcagcagaaacatgtagggttttagagctagaaatagcaagttaaaataaggctagtccgttatcaacttgaaaaagtggcaccgagtcggtgcaacattgacgcgtctctacgtgggggcgcg

SEQ ID NO: 1182 - RNA, 126 nt, synthetic construct
  source 1..126: mol_type = other RNA
cacgatcagcagaaacatgtgttttagagctagaaatagcaagttaaaataaggctagtccgttatcaacttgaaaaagtggcaccgagtcggtgcaacattgacgcgtctctacgtgggggcgcg

SEQ ID NO: 1183 - RNA, 126 nt, synthetic construct
  source 1..126: mol_type = other RNA
agagcgtgaggaagttgatggttttagagctagaaatagcaagttaaaataaggctagtccgttatcaacttgaaaaagtggcaccgagtcggtgcaacattgacgcgtctctacgtgggggcgcg

SEQ ID NO: 1184 - RNA, 133 nt, synthetic construct
  source 1..133: mol_type = other RNA
ggctcagccaggtagtactggttttagagctagaaatagcaagttaaaataaggctagtccgttatcaacttgaaaaagtggcaccgagtcggtgcaacattgacgcgtctctacgtgggggcgcgttttttt

SEQ ID NO: 1185 - RNA, 133 nt, synthetic construct
  source 1..133: mol_type = other RNA
gcgtactacacccgtcgcatgttttagagctagaaatagcaagttaaaataaggctagtccgttatcaacttgaaaaagtggcaccgagtcggtgcaacattgacgcgtctctacgtgggggcgcgttttttt

SEQ ID NO: 1186 - RNA, 134 nt, synthetic construct
  source 1..134: mol_type = other RNA
gagaactgccatggctcagccgttttagagctagaaatagcaagttaaaataaggctagtccgttatcaacttgaaaaagtggcaccgagtcggtgcaacattgacgcgtctctacgtgggggcgcgttttttt

SEQ ID NO: 1187 - RNA, 17 nt, synthetic construct
  source 1..17: mol_type = other RNA
gcccttctccaatgcga

SEQ ID NO: 1188 - RNA, 18 nt, synthetic construct
  source 1..18: mol_type = other RNA
tgcccttctccaatgcga

SEQ ID NO: 1189 - RNA, 19 nt, synthetic construct
  source 1..19: mol_type = other RNA
gtgcccttctccaatgcga

SEQ ID NO: 1190 - RNA, 21 nt, synthetic construct
  source 1..21: mol_type = other RNA
acgtgcccttctccaatgcga

SEQ ID NO: 1191 - RNA, 22 nt, synthetic construct
  source 1..22: mol_type = other RNA
tacgtgcccttctccaatgcga

SEQ ID NO: 1192-1196 - skipped (5 entries)

SEQ ID NO: 1197 - RNA, 10 nt, synthetic construct
  source 1..10: mol_type = other RNA
cattggagaa

SEQ ID NO: 1198 - RNA, 11 nt, synthetic construct
  source 1..11: mol_type = other RNA
cattggagaag

SEQ ID NO: 1199 - RNA, 12 nt, synthetic construct
  source 1..12: mol_type = other RNA
cattggagaagg

SEQ ID NO: 1200 - RNA, 13 nt, synthetic construct
  source 1..13: mol_type = other RNA
cattggagaaggg

SEQ ID NO: 1201 - RNA, 14 nt, synthetic construct
  source 1..14: mol_type = other RNA
cattggagaagggc

SEQ ID NO: 1202 - RNA, 15 nt, synthetic construct
  source 1..15: mol_type = other RNA
cattggagaagggca

SEQ ID NO: 1203 - RNA, 16 nt, synthetic construct
  source 1..16: mol_type = other RNA
cattggagaagggcac

SEQ ID NO: 1204 - RNA, 17 nt, synthetic construct
  source 1..17: mol_type = other RNA
cattggagaagggcacg

SEQ ID NO: 1205 - RNA, 18 nt, synthetic construct
  source 1..18: mol_type = other RNA
cattggagaagggcacgt

SEQ ID NO: 1206 - RNA, 19 nt, synthetic construct
  source 1..19: mol_type = other RNA
cattggagaagggcacgta

SEQ ID NO: 1207 - RNA, 22 nt, synthetic construct
  source 1..22: mol_type = other RNA
gggctgcgtaccacaccagtcg

SEQ ID NO: 1208 - RNA, 22 nt, synthetic construct
  source 1..22: mol_type = other RNA
gggctgcgtaccacacccgtcg

SEQ ID NO: 1209 - RNA, 22 nt, synthetic construct
  source 1..22: mol_type = other RNA
gggctgcgtaccacaccggtcg

SEQ ID NO: 1210 - RNA, 22 nt, synthetic construct
  source 1..22: mol_type = other RNA
gggctgcgtaccacacctgtcg

SEQ ID NO: 1211 - RNA, 23 nt, synthetic construct
  source 1..23: mol_type = other RNA
ggggctgcgtaccacaccagtcg

SEQ ID NO: 1212 - RNA, 23 nt, synthetic construct
  source 1..23: mol_type = other RNA
ggggctgcgtaccacacccgtcg

SEQ ID NO: 1213 - RNA, 23 nt, synthetic construct
  source 1..23: mol_type = other RNA
ggggctgcgtaccacaccggtcg

SEQ ID NO: 1214 - RNA, 23 nt, synthetic construct
  source 1..23: mol_type = other RNA
ggggctgcgtaccacacctgtcg

SEQ ID NO: 1215 - RNA, 24 nt, synthetic construct
  source 1..24: mol_type = other RNA
aggggctgcgtaccacaccagtcg

SEQ ID NO: 1216 - RNA, 24 nt, synthetic construct
  source 1..24: mol_type = other RNA
aggggctgcgtaccacacccgtcg

SEQ ID NO: 1217 - RNA, 24 nt, synthetic construct
  source 1..24: mol_type = other RNA
aggggctgcgtaccacaccggtcg

SEQ ID NO: 1218 - RNA, 24 nt, synthetic construct
  source 1..24: mol_type = other RNA
aggggctgcgtaccacacctgtcg

SEQ ID NO: 1219 - RNA, 25 nt, synthetic construct
  source 1..25: mol_type = other RNA
aaggggctgcgtaccacaccagtcg

SEQ ID NO: 1220 - RNA, 25 nt, synthetic construct
  source 1..25: mol_type = other RNA
aaggggctgcgtaccacacccgtcg

SEQ ID NO: 1221 - RNA, 25 nt, synthetic construct
  source 1..25: mol_type = other RNA
aaggggctgcgtaccacaccggtcg

SEQ ID NO: 1222 - RNA, 25 nt, synthetic construct
  source 1..25: mol_type = other RNA
aaggggctgcgtaccacacctgtcg

SEQ ID NO: 1223 - RNA, 26 nt, synthetic construct
  source 1..26: mol_type = other RNA
gaaggggctgcgtaccacaccagtcg

SEQ ID NO: 1224 - RNA, 26 nt, synthetic construct
  source 1..26: mol_type = other RNA
gaaggggctgcgtaccacacccgtcg

SEQ ID NO: 1225 - RNA, 26 nt, synthetic construct
  source 1..26: mol_type = other RNA
gaaggggctgcgtaccacaccggtcg

SEQ ID NO: 1226 - RNA, 26 nt, synthetic construct
  source 1..26: mol_type = other RNA
gaaggggctgcgtaccacacctgtcg

SEQ ID NO: 1227 - RNA, 27 nt, synthetic construct
  source 1..27: mol_type = other RNA
cgaaggggctgcgtaccacaccagtcg

SEQ ID NO: 1228 - RNA, 27 nt, synthetic construct
  source 1..27: mol_type = other RNA
cgaaggggctgcgtaccacacccgtcg

SEQ ID NO: 1229 - RNA, 27 nt, synthetic construct
  source 1..27: mol_type = other RNA
cgaaggggctgcgtaccacaccggtcg

SEQ ID NO: 1230 - RNA, 27 nt, synthetic construct
  source 1..27: mol_type = other RNA
cgaaggggctgcgtaccacacctgtcg

SEQ ID NO: 1231 - RNA, 28 nt, synthetic construct
  source 1..28: mol_type = other RNA
tcgaaggggctgcgtaccacaccagtcg

SEQ ID NO: 1232 - RNA, 28 nt, synthetic construct
  source 1..28: mol_type = other RNA
tcgaaggggctgcgtaccacacccgtcg

SEQ ID NO: 1233 - RNA, 28 nt, synthetic construct
  source 1..28: mol_type = other RNA
tcgaaggggctgcgtaccacaccggtcg

SEQ ID NO: 1234 - RNA, 28 nt, synthetic construct
  source 1..28: mol_type = other RNA
tcgaaggggctgcgtaccacacctgtcg

SEQ ID NO: 1235 - RNA, 29 nt, synthetic construct
  source 1..29: mol_type = other RNA
ctcgaaggggctgcgtaccacaccagtcg

SEQ ID NO: 1236 - RNA, 29 nt, synthetic construct
  source 1..29: mol_type = other RNA
ctcgaaggggctgcgtaccacacccgtcg

SEQ ID NO: 1237 - RNA, 29 nt, synthetic construct
  source 1..29: mol_type = other RNA
ctcgaaggggctgcgtaccacaccggtcg

SEQ ID NO: 1238 - RNA, 29 nt, synthetic construct
  source 1..29: mol_type = other RNA
ctcgaaggggctgcgtaccacacctgtcg

SEQ ID NO: 1239 - RNA, 30 nt, synthetic construct
  source 1..30: mol_type = other RNA
actcgaaggggctgcgtaccacaccagtcg

SEQ ID NO: 1240 - RNA, 30 nt, synthetic construct
  source 1..30: mol_type = other RNA
actcgaaggggctgcgtaccacacccgtcg

SEQ ID NO: 1241 - RNA, 30 nt, synthetic construct
  source 1..30: mol_type = other RNA
actcgaaggggctgcgtaccacaccggtcg

SEQ ID NO: 1242 - RNA, 30 nt, synthetic construct
  source 1..30: mol_type = other RNA
actcgaaggggctgcgtaccacacctgtcg

SEQ ID NO: 1243 - RNA, 31 nt, synthetic construct
  source 1..31: mol_type = other RNA
tactcgaaggggctgcgtaccacaccagtcg

SEQ ID NO: 1244 - RNA, 31 nt, synthetic construct
  source 1..31: mol_type = other RNA
tactcgaaggggctgcgtaccacacccgtcg

SEQ ID NO: 1245 - RNA, 31 nt, synthetic construct
  source 1..31: mol_type = other RNA
tactcgaaggggctgcgtaccacaccggtcg

SEQ ID NO: 1246 - RNA, 31 nt, synthetic construct
  source 1..31: mol_type = other RNA
tactcgaaggggctgcgtaccacacctgtcg

SEQ ID NO: 1247 - RNA, 32 nt, synthetic construct
  source 1..32: mol_type = other RNA
gtactcgaaggggctgcgtaccacaccagtcg

SEQ ID NO: 1248 - RNA, 32 nt, synthetic construct
  source 1..32: mol_type = other RNA
gtactcgaaggggctgcgtaccacacccgtcg

SEQ ID NO: 1249 - RNA, 32 nt, synthetic construct
  source 1..32: mol_type = other RNA
gtactcgaaggggctgcgtaccacaccggtcg

SEQ ID NO: 1250 - RNA, 32 nt, synthetic construct
  source 1..32: mol_type = other RNA
gtactcgaaggggctgcgtaccacacctgtcg

SEQ ID NO: 1251 - RNA, 33 nt, synthetic construct
  source 1..33: mol_type = other RNA
ggtactcgaaggggctgcgtaccacaccagtcg

SEQ ID NO: 1252 - RNA, 33 nt, synthetic construct
  source 1..33: mol_type = other RNA
ggtactcgaaggggctgcgtaccacacccgtcg

SEQ ID NO: 1253 - RNA, 33 nt, synthetic construct
  source 1..33: mol_type = other RNA
ggtactcgaaggggctgcgtaccacaccggtcg

SEQ ID NO: 1254 - RNA, 33 nt, synthetic construct
  source 1..33: mol_type = other RNA
ggtactcgaaggggctgcgtaccacacctgtcg

SEQ ID NO: 1255 - RNA, 34 nt, synthetic construct
  source 1..34: mol_type = other RNA
gggtactcgaaggggctgcgtaccacaccagtcg

SEQ ID NO: 1256 - RNA, 34 nt, synthetic construct
  source 1..34: mol_type = other RNA
gggtactcgaaggggctgcgtaccacacccgtcg

SEQ ID NO: 1257 - RNA, 34 nt, synthetic construct
  source 1..34: mol_type = other RNA
gggtactcgaaggggctgcgtaccacaccggtcg

SEQ ID NO: 1258 - RNA, 34 nt, synthetic construct
  source 1..34: mol_type = other RNA
gggtactcgaaggggctgcgtaccacacctgtcg

SEQ ID NO: 1259 - RNA, 35 nt, synthetic construct
  source 1..35: mol_type = other RNA
tgggtactcgaaggggctgcgtaccacaccagtcg

SEQ ID NO: 1260 - RNA, 35 nt, synthetic construct
  source 1..35: mol_type = other RNA
tgggtactcgaaggggctgcgtaccacacccgtcg

SEQ ID NO: 1261 - RNA, 35 nt, synthetic construct
  source 1..35: mol_type = other RNA
tgggtactcgaaggggctgcgtaccacaccggtcg

SEQ ID NO: 1262 - RNA, 35 nt, synthetic construct
  source 1..35: mol_type = other RNA
tgggtactcgaaggggctgcgtaccacacctgtcg

SEQ ID NO: 1263 - RNA, 36 nt, synthetic construct
  source 1..36: mol_type = other RNA
gtgggtactcgaaggggctgcgtaccacaccagtcg

SEQ ID NO: 1264 - RNA, 36 nt, synthetic construct
  source 1..36: mol_type = other RNA
gtgggtactcgaaggggctgcgtaccacacccgtcg

SEQ ID NO: 1265 - RNA, 36 nt, synthetic construct
  source 1..36: mol_type = other RNA
gtgggtactcgaaggggctgcgtaccacaccggtcg

SEQ ID NO: 1266 - RNA, 36 nt, synthetic construct
  source 1..36: mol_type = other RNA
gtgggtactcgaaggggctgcgtaccacacctgtcg

SEQ ID NO: 1267 - RNA, 37 nt, synthetic construct
  source 1..37: mol_type = other RNA
tgtgggtactcgaaggggctgcgtaccacaccagtcg

SEQ ID NO: 1268 - RNA, 37 nt, synthetic construct
  source 1..37: mol_type = other RNA
tgtgggtactcgaaggggctgcgtaccacacccgtcg

SEQ ID NO: 1269 - RNA, 37 nt, synthetic construct
  source 1..37: mol_type = other RNA
tgtgggtactcgaaggggctgcgtaccacaccggtcg

SEQ ID NO: 1270 - RNA, 37 nt, synthetic construct
  source 1..37: mol_type = other RNA
tgtgggtactcgaaggggctgcgtaccacacctgtcg

SEQ ID NO: 1271 - RNA, 38 nt, synthetic construct
  source 1..38: mol_type = other RNA
ctgtgggtactcgaaggggctgcgtaccacaccagtcg

SEQ ID NO: 1272 - RNA, 38 nt, synthetic construct
  source 1..38: mol_type = other RNA
ctgtgggtactcgaaggggctgcgtaccacacccgtcg

SEQ ID NO: 1273 - RNA, 38 nt, synthetic construct
  source 1..38: mol_type = other RNA
ctgtgggtactcgaaggggctgcgtaccacaccggtcg

SEQ ID NO: 1274 - RNA, 38 nt, synthetic construct
  source 1..38: mol_type = other RNA
ctgtgggtactcgaaggggctgcgtaccacacctgtcg

SEQ ID NO: 1275 - RNA, 39 nt, synthetic construct
  source 1..39: mol_type = other RNA
actgtgggtactcgaaggggctgcgtaccacaccagtcg

SEQ ID NO: 1276 - RNA, 39 nt, synthetic construct
  source 1..39: mol_type = other RNA
actgtgggtactcgaaggggctgcgtaccacacccgtcg

SEQ ID NO: 1277 - RNA, 39 nt, synthetic construct
  source 1..39: mol_type = other RNA
actgtgggtactcgaaggggctgcgtaccacaccggtcg

SEQ ID NO: 1278 - RNA, 39 nt, synthetic construct
  source 1..39: mol_type = other RNA
actgtgggtactcgaaggggctgcgtaccacacctgtcg

SEQ ID NO: 1279 - RNA, 40 nt, synthetic construct
  source 1..40: mol_type = other RNA
tactgtgggtactcgaaggggctgcgtaccacaccagtcg

SEQ ID NO: 1280 - RNA, 40 nt, synthetic construct
  source 1..40: mol_type = other RNA
tactgtgggtactcgaaggggctgcgtaccacacccgtcg

SEQ ID NO: 1281 - RNA, 40 nt, synthetic construct
  source 1..40: mol_type = other RNA
tactgtgggtactcgaaggggctgcgtaccacaccggtcg

SEQ ID NO: 1282 - RNA, 40 nt, synthetic construct
  source 1..40: mol_type = other RNA
tactgtgggtactcgaaggggctgcgtaccacacctgtcg

SEQ ID NO: 1283 - RNA, 20 nt, synthetic construct
  source 1..20: mol_type = other RNA
gcgtaccacaccagtcgcat

SEQ ID NO: 1284 - RNA, 20 nt, synthetic construct
  source 1..20: mol_type = other RNA
gcgtaccacaccggtcgcat

SEQ ID NO: 1285 - RNA, 20 nt, synthetic construct
  source 1..20: mol_type = other RNA
gcgtaccacacctgtcgcat

SEQ ID NO: 1286 - RNA, 130 nt, synthetic construct
  source 1..130: mol_type = other RNA
cgtgcccttctccaatgcgagttttagagctagaaatagcaagttaaaataaggctagtccgttatcaacttgaaaaagtggcaccgagtcggtgcgaaggggctgcgtaccacacccgtcgcattggag

SEQ ID NO: 1287 - RNA, 132 nt, synthetic construct
  source 1..132: mol_type = other RNA
cgtgcccttctccaatgcgagttttagagctagaaatagcaagttaaaataaggctagtccgttatcaacttgaaaaagtggcaccgagtcggtgcgaaggggctgcgtaccacacccgtcgcattggagaa

SEQ ID NO: 1288 - RNA, 132 nt, synthetic construct
  source 1..132: mol_type = other RNA
cgtgcccttctccaatgcgagttttagagctagaaatagcaagttaaaataaggctagtccgttatcaacttgaaaaagtggcaccgagtcggtgctcgaaggggctgcgtaccacacccgtcgcattggag

SEQ ID NO: 1289 - RNA, 134 nt, synthetic construct
  source 1..134: mol_type = other RNA
cgtgcccttctccaatgcgagttttagagctagaaatagcaagttaaaataaggctagtccgttatcaacttgaaaaagtggcaccgagtcggtgcgaaggggctgcgtaccacacccgtcgcattggagtttt

SEQ ID NO: 1290 - RNA, 134 nt, synthetic construct
  source 1..134: mol_type = other RNA
cgtgcccttctccaatgcgagttttagagctagaaatagcaagttaaaataaggctagtccgttatcaacttgaaaaagtggcaccgagtcggtgcgaaggggctgcgtaccacacccgtcgcattggagaagg

SEQ ID NO: 1291 - RNA, 134 nt, synthetic construct
  source 1..134: mol_type = other RNA
cgtgcccttctccaatgcgagttttagagctagaaatagcaagttaaaataaggctagtccgttatcaacttgaaaaagtggcaccgagtcggtgctcgaaggggctgcgtaccacacccgtcgcattggagaa

SEQ ID NO: 1292 - RNA, 134 nt, synthetic construct
  source 1..134: mol_type = other RNA
cgtgcccttctccaatgcgagttttagagctagaaatagcaagttaaaataaggctagtccgttatcaacttgaaaaagtggcaccgagtcggtgcactcgaaggggctgcgtaccacacccgtcgcattggag

SEQ ID NO: 1293 - RNA, 136 nt, synthetic construct
  source 1..136: mol_type = other RNA
cgtgcccttctccaatgcgagttttagagctagaaatagcaagttaaaataaggctagtccgttatcaacttgaaaaagtggcaccgagtcggtgctcgaaggggctgcgtaccacacccgtcgcattggagtttt

SEQ ID NO: 1294 - RNA, 136 nt, synthetic construct
  source 1..136: mol_type = other RNA
cgtgcccttctccaatgcgagttttagagctagaaatagcaagttaaaataaggctagtccgttatcaacttgaaaaagtggcaccgagtcggtgcgaaggggctgcgtaccacacccgtcgcattggagaatttt

SEQ ID NO: 1295 - RNA, 136 nt, synthetic construct
  source 1..136: mol_type = other RNA
cgtgcccttctccaatgcgagttttagagctagaaatagcaagttaaaataaggctagtccgttatcaacttgaaaaagtggcaccgagtcggtgcgaaggggctgcgtaccacacccgtcgcattggagaagggc

SEQ ID NO: 1296 - RNA, 136 nt, synthetic construct
  source 1..136: mol_type = other RNA
cgtgcccttctccaatgcgagttttagagctagaaatagcaagttaaaataaggctagtccgttatcaacttgaaaaagtggcaccgagtcggtgctcgaaggggctgcgtaccacacccgtcgcattggagaagg

SEQ ID NO: 1297 - RNA, 136 nt, synthetic construct
  source 1..136: mol_type = other RNA
cgtgcccttctccaatgcgagttttagagctagaaatagcaagttaaaataaggctagtccgttatcaacttgaaaaagtggcaccgagtcggtgcactcgaaggggctgcgtaccacacccgtcgcattggagaa

SEQ ID NO: 1298 - RNA, 136 nt, synthetic construct
  source 1..136: mol_type = other RNA
cgtgcccttctccaatgcgagttttagagctagaaatagcaagttaaaataaggctagtccgttatcaacttgaaaaagtggcaccgagtcggtgcgtactcgaaggggctgcgtaccacacccgtcgcattggag

SEQ ID NO: 1299 - RNA, 138 nt, synthetic construct
  source 1..138: mol_type = other RNA
cgtgcccttctccaatgcgagttttagagctagaaatagcaagttaaaataaggctagtccgttatcaacttgaaaaagtggcaccgagtcggtgcactcgaaggggctgcgtaccacacccgtcgcattggagtttt

SEQ ID NO: 1300 - RNA, 138 nt, synthetic construct
  source 1..138: mol_type = other RNA
cgtgcccttctccaatgcgagttttagagctagaaatagcaagttaaaataaggctagtccgttatcaacttgaaaaagtggcaccgagtcggtgctcgaaggggctgcgtaccacacccgtcgcattggagaatttt

SEQ ID NO: 1301 - RNA, 138 nt, synthetic construct
  source 1..138: mol_type = other RNA
cgtgcccttctccaatgcgagttttagagctagaaatagcaagttaaaataaggctagtccgttatcaacttgaaaaagtggcaccgagtcggtgcgaaggggctgcgtaccacacccgtcgcattggagaaggtttt

SEQ ID NO: 1302 - RNA, 138 nt, synthetic construct
  source 1..138: mol_type = other RNA
cgtgcccttctccaatgcgagttttagagctagaaatagcaagttaaaataaggctagtccgttatcaacttgaaaaagtggcaccgagtcggtgctcgaaggggctgcgtaccacacccgtcgcattggagaagggc

SEQ ID NO: 1303 - RNA, 138 nt, synthetic construct
  source 1..138: mol_type = other RNA
cgtgcccttctccaatgcgagttttagagctagaaatagcaagttaaaataaggctagtccgttatcaacttgaaaaagtggcaccgagtcggtgcactcgaaggggctgcgtaccacacccgtcgcattggagaagg

SEQ ID NO: 1304 - RNA, 138 nt, synthetic construct
  source 1..138: mol_type = other RNA
cgtgcccttctccaatgcgagttttagagctagaaatagcaagttaaaataaggctagtccgttatcaacttgaaaaagtggcaccgagtcggtgcgtactcgaaggggctgcgtaccacacccgtcgcattggagaa

SEQ ID NO: 1305 - RNA, 140 nt, synthetic construct
  source 1..140: mol_type = other RNA
cgtgcccttctccaatgcgagttttagagctagaaatagcaagttaaaataaggctagtccgttatcaacttgaaaaagtggcaccgagtcggtgcgtactcgaaggggctgcgtaccacacccgtcgcattggagtttt

SEQ ID NO: 1306 - RNA, 140 nt, synthetic construct
  source 1..140: mol_type = other RNA
cgtgcccttctccaatgcgagttttagagctagaaatagcaagttaaaataaggctagtccgttatcaacttgaaaaagtggcaccgagtcggtgcactcgaaggggctgcgtaccacacccgtcgcattggagaatttt

SEQ ID NO: 1307 - RNA, 140 nt, synthetic construct
  source 1..140: mol_type = other RNA
cgtgcccttctccaatgcgagttttagagctagaaatagcaagttaaaataaggctagtccgttatcaacttgaaaaagtggcaccgagtcggtgctcgaaggggctgcgtaccacacccgtcgcattggagaaggtttt

SEQ ID NO: 1308 - RNA, 140 nt, synthetic construct
  source 1..140: mol_type = other RNA
cgtgcccttctccaatgcgagttttagagctagaaatagcaagttaaaataaggctagtccgttatcaacttgaaaaagtggcaccgagtcggtgcgaaggggctgcgtaccacacccgtcgcattggagaagggctttt

SEQ ID NO: 1309 - RNA, 140 nt, synthetic construct
  source 1..140: mol_type = other RNA
cgtgcccttctccaatgcgagttttagagctagaaatagcaagttaaaataaggctagtccgttatcaacttgaaaaagtggcaccgagtcggtgcactcgaaggggctgcgtaccacacccgtcgcattggagaagggc

SEQ ID NO: 1310 - RNA, 140 nt, synthetic construct
  source 1..140: mol_type = other RNA
cgtgcccttctccaatgcgagttttagagctagaaatagcaagttaaaataaggctagtccgttatcaacttgaaaaagtggcaccgagtcggtgcgtactcgaaggggctgcgtaccacacccgtcgcattggagaagg

SEQ ID NO: 1311 - RNA, 142 nt, synthetic construct
  source 1..142: mol_type = other RNA
cgtgcccttctccaatgcgagttttagagctagaaatagcaagttaaaataaggctagtccgttatcaacttgaaaaagtggcaccgagtcggtgcgtactcgaaggggctgcgtaccacacccgtcgcattggagaatttt

SEQ ID NO: 1312 - RNA, 142 nt, synthetic construct
  source 1..142: mol_type = other RNA
cgtgcccttctccaatgcgagttttagagctagaaatagcaagttaaaataaggctagtccgttatcaacttgaaaaagtggcaccgagtcggtgcactcgaaggggctgcgtaccacacccgtcgcattggagaaggtttt

SEQ ID NO: 1313 - RNA, 142 nt, synthetic construct
  source 1..142: mol_type = other RNA
cgtgcccttctccaatgcgagttttagagctagaaatagcaagttaaaataaggctagtccgttatcaacttgaaaaagtggcaccgagtcggtgctcgaaggggctgcgtaccacacccgtcgcattggagaagggctttt

SEQ ID NO: 1314 - RNA, 142 nt, synthetic construct
  source 1..142: mol_type = other RNA
cgtgcccttctccaatgcgagttttagagctagaaatagcaagttaaaataaggctagtccgttatcaacttgaaaaagtggcaccgagtcggtgcgtactcgaaggggctgcgtaccacacccgtcgcattggagaagggc

SEQ ID NO: 1315 - RNA, 144 nt, synthetic construct
  source 1..144: mol_type = other RNA
cgtgcccttctccaatgcgagttttagagctagaaatagcaagttaaaataaggctagtccgttatcaacttgaaaaagtggcaccgagtcggtgcgtactcgaaggggctgcgtaccacacccgtcgcattggagaaggtttt

SEQ ID NO: 1316 - RNA, 144 nt, synthetic construct
  source 1..144: mol_type = other RNA
cgtgcccttctccaatgcgagttttagagctagaaatagcaagttaaaataaggctagtccgttatcaacttgaaaaagtggcaccgagtcggtgcactcgaaggggctgcgtaccacacccgtcgcattggagaagggctttt

SEQ ID NO: 1317 - RNA, 146 nt, synthetic construct
  source 1..146: mol_type = other RNA
cgtgcccttctccaatgcgagttttagagctagaaatagcaagttaaaataaggctagtccgttatcaacttgaaaaagtggcaccgagtcggtgcgtactcgaaggggctgcgtaccacacccgtcgcattggagaagggctttt

SEQ ID NO: 1318 - RNA, 160 nt, synthetic construct
  source 1..160: mol_type = other RNA
cgtgcccttctccaatgcgagttttagagctagaaatagcaagttaaaataaggctagtccgttatcaacttgaaaaagtggcaccgagtcggtgcgaaggggctgcgtaccacacccgtcgcattggagaacattgacgcgtctctacgtgggggcgcg

SEQ ID NO: 1319 - RNA, 162 nt, synthetic construct
  source 1..162: mol_type = other RNA
cgtgcccttctccaatgcgagttttagagctagaaatagcaagttaaaataaggctagtccgttatcaacttgaaaaagtggcaccgagtcggtgcgaaggggctgcgtaccacacccgtcgcattggagaaaacattgacgcgtctctacgtgggggcgcg

SEQ ID NO: 1320 - RNA, 162 nt, synthetic construct
  source 1..162: mol_type = other RNA
cgtgcccttctccaatgcgagttttagagctagaaatagcaagttaaaataaggctagtccgttatcaacttgaaaaagtggcaccgagtcggtgctcgaaggggctgcgtaccacacccgtcgcattggagaacattgacgcgtctctacgtgggggcgcg

SEQ ID NO: 1321 - RNA, 164 nt, synthetic construct
  source 1..164: mol_type = other RNA
cgtgcccttctccaatgcgagttttagagctagaaatagcaagttaaaataaggctagtccgttatcaacttgaaaaagtggcaccgagtcggtgcgaaggggctgcgtaccacacccgtcgcattggagaaggaacattgacgcgtctctacgtgggggcgcg

SEQ ID NO: 1322 - RNA, 164 nt, synthetic construct
  source 1..164: mol_type = other RNA
cgtgcccttctccaatgcgagttttagagctagaaatagcaagttaaaataaggctagtccgttatcaacttgaaaaagtggcaccgagtcggtgctcgaaggggctgcgtaccacacccgtcgcattggagaaaacattgacgcgtctctacgtgggggcgcg

SEQ ID NO: 1323 - RNA, 164 nt, synthetic construct
  source 1..164: mol_type = other RNA
cgtgcccttctccaatgcgagttttagagctagaaatagcaagttaaaataaggctagtccgttatcaacttgaaaaagtggcaccgagtcggtgcactcgaaggggctgcgtaccacacccgtcgcattggagaacattgacgcgtctctacgtgggggcgcg

SEQ ID NO: 1324 - RNA, 166 nt, synthetic construct
  source 1..166: mol_type = other RNA
cgtgcccttctccaatgcgagttttagagctagaaatagcaagttaaaataaggctagtccgttatcaacttgaaaaagtggcaccgagtcggtgcgaaggggctgcgtaccacacccgtcgcattggagaagggcaacattgacgcgtctctacgtgggggcgcg

SEQ ID NO: 1325 - RNA, 166 nt, synthetic construct
  source 1..166: mol_type = other RNA
cgtgcccttctccaatgcgagttttagagctagaaatagcaagttaaaataaggctagtccgttatcaacttgaaaaagtggcaccgagtcggtgctcgaaggggctgcgtaccacacccgtcgcattggagaaggaacattgacgcgtctctacgtgggggcgcg

SEQ ID NO: 1326 - RNA, 166 nt, synthetic construct
  source 1..166: mol_type = other RNA
cgtgcccttctccaatgcgagttttagagctagaaatagcaagttaaaataaggctagtccgttatcaacttgaaaaagtggcaccgagtcggtgcactcgaaggggctgcgtaccacacccgtcgcattggagaaaacattgacgcgtctctacgtgggggcgcg

SEQ ID NO: 1327 - RNA, 168 nt, synthetic construct
  source 1..168: mol_type = other RNA
cgtgcccttctccaatgcgagttttagagctagaaatagcaagttaaaataaggctagtccgttatcaacttgaaaaagtggcaccgagtcggtgctcgaaggggctgcgtaccacacccgtcgcattggagaagggcaacattgacgcgtctctacgtgggggcgcg

SEQ ID NO: 1328 - RNA, 168 nt, synthetic construct
  source 1..168: mol_type = other RNA
cgtgcccttctccaatgcgagttttagagctagaaatagcaagttaaaataaggctagtccgttatcaacttgaaaaagtggcaccgagtcggtgcactcgaaggggctgcgtaccacacccgtcgcattggagaaggaacattgacgcgtctctacgtgggggcgcg

SEQ ID NO: 1329 - RNA, 170 nt, synthetic construct
  source 1..170: mol_type = other RNA
cgtgcccttctccaatgcgagttttagagctagaaatagcaagttaaaataaggctagtccgttatcaacttgaaaaagtggcaccgagtcggtgcactcgaaggggctgcgtaccacacccgtcgcattggagaagggcaacattgacgcgtctctacgtgggggcgcg

SEQ ID NO: 1330 - RNA, 17 nt, synthetic construct
  source 1..17: mol_type = other RNA
tcagccaggtagtactg

SEQ ID NO: 1331 - RNA, 18 nt, synthetic construct
  source 1..18: mol_type = other RNA
ctcagccaggtagtactg

SEQ ID NO: 1332 - RNA, 19 nt, synthetic construct
  source 1..19: mol_type = other RNA
gctcagccaggtagtactg

SEQ ID NO: 1333 - RNA, 21 nt, synthetic construct
  source 1..21: mol_type = other RNA
tggctcagccaggtagtactg

SEQ ID NO: 1334 - RNA, 22 nt, synthetic construct
  source 1..22: mol_type = other RNA
atggctcagccaggtagtactg

SEQ ID NO: 1335-1339 - skipped (5 entries)

SEQ ID NO: 1340 - RNA, 10 nt, synthetic construct
  source 1..10: mol_type = other RNA
tactacctgg

SEQ ID NO: 1341 - RNA, 11 nt, synthetic construct
  source 1..11: mol_type = other RNA
tactacctggc

SEQ ID NO: 1342 - RNA, 12 nt, synthetic construct
  source 1..12: mol_type = other RNA
tactacctggct

SEQ ID NO: 1343 - RNA, 13 nt, synthetic construct
  source 1..13: mol_type = other RNA
tactacctggctg

SEQ ID NO: 1344 - RNA, 14 nt, synthetic construct
  source 1..14: mol_type = other RNA
tactacctggctga

SEQ ID NO: 1345 - RNA, 15 nt, synthetic construct
  source 1..15: mol_type = other RNA
tactacctggctgag

SEQ ID NO: 1346 - RNA, 16 nt, synthetic construct
  source 1..16: mol_type = other RNA
tactacctggctgagc

SEQ ID NO: 1347 - RNA, 17 nt, synthetic construct
  source 1..17: mol_type = other RNA
tactacctggctgagcc

SEQ ID NO: 1348 - RNA, 18 nt, synthetic construct
  source 1..18: mol_type = other RNA
tactacctggctgagcca

SEQ ID NO: 1349 - RNA, 19 nt, synthetic construct
  source 1..19: mol_type = other RNA
tactacctggctgagccat

SEQ ID NO: 1350 - RNA, 17 nt, synthetic construct
  source 1..17: mol_type = other RNA
ccttcgagtacccacag

SEQ ID NO: 1351 - RNA, 18 nt, synthetic construct
  source 1..18: mol_type = other RNA
cccttcgagtacccacag

SEQ ID NO: 1352 - RNA, 19 nt, synthetic construct
  source 1..19: mol_type = other RNA
ccccttcgagtacccacag

SEQ ID NO: 1353 - RNA, 20 nt, synthetic construct
  source 1..20: mol_type = other RNA
gccccttcgagtacccacag

SEQ ID NO: 1354 - RNA, 21 nt, synthetic construct
  source 1..21: mol_type = other RNA
agccccttcgagtacccacag

SEQ ID NO: 1355 - RNA, 22 nt, synthetic construct
  source 1..22: mol_type = other RNA
cagccccttcgagtacccacag

SEQ ID NO: 1356 - RNA, 23 nt, synthetic construct
  source 1..23: mol_type = other RNA
gcagccccttcgagtacccacag

SEQ ID NO: 1357 - RNA, 24 nt, synthetic construct
  source 1..24: mol_type = other RNA
cgcagccccttcgagtacccacag

SEQ ID NO: 1358 - RNA, 25 nt, synthetic construct
  source 1..25: mol_type = other RNA
acgcagccccttcgagtacccacag

SEQ ID NO: 1359 - RNA, 26 nt, synthetic construct
  source 1..26: mol_type = other RNA
tacgcagccccttcgagtacccacag

SEQ ID NO: 1360 - RNA, 27 nt, synthetic construct
  source 1..27: mol_type = other RNA
gtacgcagccccttcgagtacccacag

SEQ ID NO: 1361 - RNA, 28 nt, synthetic construct
  source 1..28: mol_type = other RNA
ggtacgcagccccttcgagtacccacag

SEQ ID NO: 1362 - RNA, 29 nt, synthetic construct
  source 1..29: mol_type = other RNA
tggtacgcagccccttcgagtacccacag

SEQ ID NO: 1363 - RNA, 30 nt, synthetic construct
  source 1..30: mol_type = other RNA
gtggtacgcagccccttcgagtacccacag

SEQ ID NO: 1364 - RNA, 31 nt, synthetic construct
  source 1..31: mol_type = other RNA
tgtggtacgcagccccttcgagtacccacag

SEQ ID NO: 1365 - RNA, 32 nt, synthetic construct
  source 1..32: mol_type = other RNA
gtgtggtacgcagccccttcgagtacccacag

SEQ ID NO: 1366 - RNA, 33 nt, synthetic construct
  source 1..33: mol_type = other RNA
ggtgtggtacgcagccccttcgagtacccacag

SEQ ID NO: 1367 - RNA, 34 nt, synthetic construct
  source 1..34: mol_type = other RNA
gggtgtggtacgcagccccttcgagtacccacag

SEQ ID NO: 1368 - RNA, 35 nt, synthetic construct
  source 1..35: mol_type = other RNA
cgggtgtggtacgcagccccttcgagtacccacag

SEQ ID NO: 1369 - RNA, 36 nt, synthetic construct
  source 1..36: mol_type = other RNA
acgggtgtggtacgcagccccttcgagtacccacag

SEQ ID NO: 1370 - RNA, 37 nt, synthetic construct
  source 1..37: mol_type = other RNA
gacgggtgtggtacgcagccccttcgagtacccacag

SEQ ID NO: 1371 - RNA, 38 nt, synthetic construct
  source 1..38: mol_type = other RNA
cgacgggtgtggtacgcagccccttcgagtacccacag

SEQ ID NO: 1372 - RNA, 39 nt, synthetic construct
  source 1..39: mol_type = other RNA
gcgacgggtgtggtacgcagccccttcgagtacccacag

SEQ ID NO: 1373 - RNA, 40 nt, synthetic construct
  source 1..40: mol_type = other RNA
tgcgacgggtgtggtacgcagccccttcgagtacccacag

SEQ ID NO: 1374 - RNA, 125 nt, synthetic construct
  source 1..125: mol_type = other RNA
ggctcagccaggtagtactggttttagagctagaaatagcaagttaaaataaggctagtccgttatcaacttgaaaaagtggcaccgagtcggtgcagccccttcgagtacccacagtactacct

SEQ ID NO: 1375 - RNA, 127 nt, synthetic construct
  source 1..127: mol_type = other RNA
ggctcagccaggtagtactggttttagagctagaaatagcaagttaaaataaggctagtccgttatcaacttgaaaaagtggcaccgagtcggtgcgcagccccttcgagtacccacagtactacct

SEQ ID NO: 1376 - RNA, 127 nt, synthetic construct
  source 1..127: mol_type = other RNA
ggctcagccaggtagtactggttttagagctagaaatagcaagttaaaataaggctagtccgttatcaacttgaaaaagtggcaccgagtcggtgcagccccttcgagtacccacagtactacctgg

SEQ ID NO: 1377 - RNA, 129 nt, synthetic construct
  source 1..129: mol_type = other RNA
ggctcagccaggtagtactggttttagagctagaaatagcaagttaaaataaggctagtccgttatcaacttgaaaaagtggcaccgagtcggtgcagccccttcgagtacccacagtactaccttttt

SEQ ID NO: 1378 - RNA, 129 nt, synthetic construct
  source 1..129: mol_type = other RNA
ggctcagccaggtagtactggttttagagctagaaatagcaagttaaaataaggctagtccgttatcaacttgaaaaagtggcaccgagtcggtgcacgcagccccttcgagtacccacagtactacct

SEQ ID NO: 1379 - RNA, 129 nt, synthetic construct
  source 1..129: mol_type = other RNA
ggctcagccaggtagtactggttttagagctagaaatagcaagttaaaataaggctagtccgttatcaacttgaaaaagtggcaccgagtcggtgcgcagccccttcgagtacccacagtactacctgg

SEQ ID NO: 1380 - RNA, 129 nt, synthetic construct
  source 1..129: mol_type = other RNA
ggctcagccaggtagtactggttttagagctagaaatagcaagttaaaataaggctagtccgttatcaacttgaaaaagtggcaccgagtcggtgcagccccttcgagtacccacagtactacctggct

SEQ ID NO: 1381 - RNA, 130 nt, synthetic construct
  source 1..130: mol_type = other RNA
ggctcagccaggtagtactggttttagagctagaaatagcaagttaaaataaggctagtccgttatcaacttgaaaaagtggcaccgagtcggtgctacgcagccccttcgagtacccacagtactacct

SEQ ID NO: 1382 - RNA, 131 nt, synthetic construct
  source 1..131: mol_type = other RNA
ggctcagccaggtagtactggttttagagctagaaatagcaagttaaaataaggctagtccgttatcaacttgaaaaagtggcaccgagtcggtgcgcagccccttcgagtacccacagtactaccttttt

SEQ ID NO: 1383 - RNA, 131 nt, synthetic construct
  source 1..131: mol_type = other RNA
ggctcagccaggtagtactggttttagagctagaaatagcaagttaaaataaggctagtccgttatcaacttgaaaaagtggcaccgagtcggtgcagccccttcgagtacccacagtactacctggtttt

SEQ ID NO: 1384 - RNA, 131 nt, synthetic construct
  source 1..131: mol_type = other RNA
ggctcagccaggtagtactggttttagagctagaaatagcaagttaaaataaggctagtccgttatcaacttgaaaaagtggcaccgagtcggtgcgtacgcagccccttcgagtacccacagtactacct

SEQ ID NO: 1385 - RNA, 131 nt, synthetic construct
  source 1..131: mol_type = other RNA
ggctcagccaggtagtactggttttagagctagaaatagcaagttaaaataaggctagtccgttatcaacttgaaaaagtggcaccgagtcggtgcacgcagccccttcgagtacccacagtactacctgg

SEQ ID NO: 1386 - RNA, 131 nt, synthetic construct
  source 1..131: mol_type = other RNA
ggctcagccaggtagtactggttttagagctagaaatagcaagttaaaataaggctagtccgttatcaacttgaaaaagtggcaccgagtcggtgcgcagccccttcgagtacccacagtactacctggct

SEQ ID NO: 1387 - RNA, 131 nt, synthetic construct
  source 1..131: mol_type = other RNA
ggctcagccaggtagtactggttttagagctagaaatagcaagttaaaataaggctagtccgttatcaacttgaaaaagtggcaccgagtcggtgcagccccttcgagtacccacagtactacctggctga

SEQ ID NO: 1388 - RNA, 132 nt, synthetic construct
  source 1..132: mol_type = other RNA
ggctcagccaggtagtactggttttagagctagaaatagcaagttaaaataaggctagtccgttatcaacttgaaaaagtggcaccgagtcggtgctacgcagccccttcgagtacccacagtactacctgg

SEQ ID NO: 1389 - RNA, 132 nt, synthetic construct
  source 1..132: mol_type = other RNA
ggctcagccaggtagtactggttttagagctagaaatagcaagttaaaataaggctagtccgttatcaacttgaaaaagtggcaccgagtcggtgcggtacgcagccccttcgagtacccacagtactacct

SEQ ID NO: 1390 - RNA, 133 nt, synthetic construct
  source 1..133: mol_type = other RNA
ggctcagccaggtagtactggttttagagctagaaatagcaagttaaaataaggctagtccgttatcaacttgaaaaagtggcaccgagtcggtgcacgcagccccttcgagtacccacagtactaccttttt

SEQ ID NO: 1391 - RNA, 133 nt, synthetic construct
  source 1..133: mol_type = other RNA
ggctcagccaggtagtactggttttagagctagaaatagcaagttaaaataaggctagtccgttatcaacttgaaaaagtggcaccgagtcggtgcgcagccccttcgagtacccacagtactacctggtttt

SEQ ID NO: 1392 - RNA, 133 nt, synthetic construct
  source 1..133: mol_type = other RNA
ggctcagccaggtagtactggttttagagctagaaatagcaagttaaaataaggctagtccgttatcaacttgaaaaagtggcaccgagtcggtgcagccccttcgagtacccacagtactacctggcttttt

SEQ ID NO: 1393 - RNA, 133 nt, synthetic construct
  source 1..133: mol_type = other RNA
ggctcagccaggtagtactggttttagagctagaaatagcaagttaaaataaggctagtccgttatcaacttgaaaaagtggcaccgagtcggtgcgtacgcagccccttcgagtacccacagtactacctgg

SEQ ID NO: 1394 - RNA, 133 nt, synthetic construct
  source 1..133: mol_type = other RNA
ggctcagccaggtagtactggttttagagctagaaatagcaagttaaaataaggctagtccgttatcaacttgaaaaagtggcaccgagtcggtgcacgcagccccttcgagtacccacagtactacctggct

SEQ ID NO: 1395 - RNA, 133 nt, synthetic construct
  source 1..133: mol_type = other RNA
ggctcagccaggtagtactggttttagagctagaaatagcaagttaaaataaggctagtccgttatcaacttgaaaaagtggcaccgagtcggtgcgcagccccttcgagtacccacagtactacctggctga

SEQ ID NO: 1396 - RNA, 134 nt, synthetic construct
  source 1..134: mol_type = other RNA
ggctcagccaggtagtactggttttagagctagaaatagcaagttaaaataaggctagtccgttatcaacttgaaaaagtggcaccgagtcggtgctacgcagccccttcgagtacccacagtactacctggct

SEQ ID NO: 1397 - RNA, 134 nt, synthetic construct
  source 1..134: mol_type = other RNA
ggctcagccaggtagtactggttttagagctagaaatagcaagttaaaataaggctagtccgttatcaacttgaaaaagtggcaccgagtcggtgcggtacgcagccccttcgagtacccacagtactacctgg

SEQ ID NO: 1398 - RNA, 134 nt, synthetic construct
  source 1..134: mol_type = other RNA
ggctcagccaggtagtactggttttagagctagaaatagcaagttaaaataaggctagtccgttatcaacttgaaaaagtggcaccgagtcggtgcgtggtacgcagccccttcgagtacccacagtactacct

SEQ ID NO: 1399 - RNA, 135 nt, synthetic construct
  source 1..135: mol_type = other RNA
ggctcagccaggtagtactggttttagagctagaaatagcaagttaaaataaggctagtccgttatcaacttgaaaaagtggcaccgagtcggtgcgtacgcagccccttcgagtacccacagtactaccttttt

SEQ ID NO: 1400 - RNA, 135 nt, synthetic construct
  source 1..135: mol_type = other RNA
ggctcagccaggtagtactggttttagagctagaaatagcaagttaaaataaggctagtccgttatcaacttgaaaaagtggcaccgagtcggtgcacgcagccccttcgagtacccacagtactacctggtttt

SEQ ID NO: 1401 - RNA, 135 nt, synthetic construct
  source 1..135: mol_type = other RNA
ggctcagccaggtagtactggttttagagctagaaatagcaagttaaaataaggctagtccgttatcaacttgaaaaagtggcaccgagtcggtgcgcagccccttcgagtacccacagtactacctggcttttt

SEQ ID NO: 1402 - RNA, 135 nt, synthetic construct
  source 1..135: mol_type = other RNA
ggctcagccaggtagtactggttttagagctagaaatagcaagttaaaataaggctagtccgttatcaacttgaaaaagtggcaccgagtcggtgcagccccttcgagtacccacagtactacctggctgatttt

SEQ ID NO: 1403 - RNA, 135 nt, synthetic construct
  source 1..135: mol_type = other RNA
ggctcagccaggtagtactggttttagagctagaaatagcaagttaaaataaggctagtccgttatcaacttgaaaaagtggcaccgagtcggtgctacgcagccccttcgagtacccacagtactacctggctg

SEQ ID NO: 1404 - RNA, 135 nt, synthetic construct
  source 1..135: mol_type = other RNA
ggctcagccaggtagtactggttttagagctagaaatagcaagttaaaataaggctagtccgttatcaacttgaaaaagtggcaccgagtcggtgcgtacgcagccccttcgagtacccacagtactacctggct

SEQ ID NO: 1405 - RNA, 135 nt, synthetic construct
  source 1..135: mol_type = other RNA
ggctcagccaggtagtactggttttagagctagaaatagcaagttaaaataaggctagtccgttatcaacttgaaaaagtggcaccgagtcggtgcacgcagccccttcgagtacccacagtactacctggctga

SEQ ID NO: 1406 - RNA, 136 nt, synthetic construct
  source 1..136: mol_type = other RNA
ggctcagccaggtagtactggttttagagctagaaatagcaagttaaaataaggctagtccgttatcaacttgaaaaagtggcaccgagtcggtgctacgcagccccttcgagtacccacagtactacctggctga

SEQ ID NO: 1407 - RNA, 136 nt, synthetic construct
  source 1..136: mol_type = other RNA
ggctcagccaggtagtactggttttagagctagaaatagcaagttaaaataaggctagtccgttatcaacttgaaaaagtggcaccgagtcggtgcggtacgcagccccttcgagtacccacagtactacctggct

SEQ ID NO: 1408 - RNA, 136 nt, synthetic construct
  source 1..136: mol_type = other RNA
ggctcagccaggtagtactggttttagagctagaaatagcaagttaaaataaggctagtccgttatcaacttgaaaaagtggcaccgagtcggtgcgtggtacgcagccccttcgagtacccacagtactacctgg

SEQ ID NO: 1409 - RNA, 137 nt, synthetic construct
  source 1..137: mol_type = other RNA
ggctcagccaggtagtactggttttagagctagaaatagcaagttaaaataaggctagtccgttatcaacttgaaaaagtggcaccgagtcggtgcgtacgcagccccttcgagtacccacagtactacctggtttt

SEQ ID NO: 1410 - RNA, 137 nt, synthetic construct
  source 1..137: mol_type = other RNA
ggctcagccaggtagtactggttttagagctagaaatagcaagttaaaataaggctagtccgttatcaacttgaaaaagtggcaccgagtcggtgcacgcagccccttcgagtacccacagtactacctggcttttt

SEQ ID NO: 1411 - RNA, 137 nt, synthetic construct
  source 1..137: mol_type = other RNA
ggctcagccaggtagtactggttttagagctagaaatagcaagttaaaataaggctagtccgttatcaacttgaaaaagtggcaccgagtcggtgcgcagccccttcgagtacccacagtactacctggctgatttt

SEQ ID NO: 1412 - RNA, 137 nt, synthetic construct
  source 1..137: mol_type = other RNA
ggctcagccaggtagtactggttttagagctagaaatagcaagttaaaataaggctagtccgttatcaacttgaaaaagtggcaccgagtcggtgctacgcagccccttcgagtacccacagtactacctggctgag

SEQ ID NO: 1413 - RNA, 137 nt, synthetic construct
  source 1..137: mol_type = other RNA
ggctcagccaggtagtactggttttagagctagaaatagcaagttaaaataaggctagtccgttatcaacttgaaaaagtggcaccgagtcggtgcgtacgcagccccttcgagtacccacagtactacctggctga

SEQ ID NO: 1414 - RNA, 138 nt, synthetic construct
  source 1..138: mol_type = other RNA
ggctcagccaggtagtactggttttagagctagaaatagcaagttaaaataaggctagtccgttatcaacttgaaaaagtggcaccgagtcggtgcggtacgcagccccttcgagtacccacagtactacctggctga

SEQ ID NO: 1415 - RNA, 138 nt, synthetic construct
  source 1..138: mol_type = other RNA
ggctcagccaggtagtactggttttagagctagaaatagcaagttaaaataaggctagtccgttatcaacttgaaaaagtggcaccgagtcggtgcgtggtacgcagccccttcgagtacccacagtactacctggct

SEQ ID NO: 1416 - RNA, 138 nt, synthetic construct
  source 1..138: mol_type = other RNA
ggctcagccaggtagtactggttttagagctagaaatagcaagttaaaataaggctagtccgttatcaacttgaaaaagtggcaccgagtcggtgctacgcagccccttcgagtacccacagtactacctggctgagc

SEQ ID NO: 1417 - RNA, 139 nt, synthetic construct
  source 1..139: mol_type = other RNA
ggctcagccaggtagtactggttttagagctagaaatagcaagttaaaataaggctagtccgttatcaacttgaaaaagtggcaccgagtcggtgcgtacgcagccccttcgagtacccacagtactacctggcttttt

SEQ ID NO: 1418 - RNA, 139 nt, synthetic construct
  source 1..139: mol_type = other RNA
ggctcagccaggtagtactggttttagagctagaaatagcaagttaaaataaggctagtccgttatcaacttgaaaaagtggcaccgagtcggtgcacgcagccccttcgagtacccacagtactacctggctgatttt

SEQ ID NO: 1419 - RNA, 140 nt, synthetic construct
  source 1..140: mol_type = other RNA
ggctcagccaggtagtactggttttagagctagaaatagcaagttaaaataaggctagtccgttatcaacttgaaaaagtggcaccgagtcggtgcgtggtacgcagccccttcgagtacccacagtactacctggctga

SEQ ID NO: 1420 - RNA, 141 nt, synthetic construct
  source 1..141: mol_type = other RNA
ggctcagccaggtagtactggttttagagctagaaatagcaagttaaaataaggctagtccgttatcaacttgaaaaagtggcaccgagtcggtgcgtacgcagccccttcgagtacccacagtactacctggctgatttt

SEQ ID NO: 1421 - RNA, 160 nt, synthetic construct
  source 1..160: mol_type = other RNA
ggctcagccaggtagtactggttttagagctagaaatagcaagttaaaataaggctagtccgttatcaacttgaaaaagtggcaccgagtcggtgctacgcagccccttcgagtacccacagtactacctaacattgacgcgtctctacgtgggggcgcg

SEQ ID NO: 1422 - RNA, 162 nt, synthetic construct
  source 1..162: mol_type = other RNA
ggctcagccaggtagtactggttttagagctagaaatagcaagttaaaataaggctagtccgttatcaacttgaaaaagtggcaccgagtcggtgctacgcagccccttcgagtacccacagtactacctggaacattgacgcgtctctacgtgggggcgcg

SEQ ID NO: 1423 - RNA, 162 nt, synthetic construct
  source 1..162: mol_type = other RNA
ggctcagccaggtagtactggttttagagctagaaatagcaagttaaaataaggctagtccgttatcaacttgaaaaagtggcaccgagtcggtgcggtacgcagccccttcgagtacccacagtactacctaacattgacgcgtctctacgtgggggcgcg

SEQ ID NO: 1424 - RNA, 164 nt, synthetic construct
  source 1..164: mol_type = other RNA
ggctcagccaggtagtactggttttagagctagaaatagcaagttaaaataaggctagtccgttatcaacttgaaaaagtggcaccgagtcggtgctacgcagccccttcgagtacccacagtactacctggctaacattgacgcgtctctacgtgggggcgcg

SEQ ID NO: 1425 - RNA, 164 nt, synthetic construct
  source 1..164: mol_type = other RNA
ggctcagccaggtagtactggttttagagctagaaatagcaagttaaaataaggctagtccgttatcaacttgaaaaagtggcaccgagtcggtgcggtacgcagccccttcgagtacccacagtactacctggaacattgacgcgtctctacgtgggggcgcg

SEQ ID NO: 1426 - RNA, 164 nt, synthetic construct
  source 1..164: mol_type = other RNA
ggctcagccaggtagtactggttttagagctagaaatagcaagttaaaataaggctagtccgttatcaacttgaaaaagtggcaccgagtcggtgcgtggtacgcagccccttcgagtacccacagtactacctaacattgacgcgtctctacgtgggggcgcg

SEQ ID NO: 1427 - RNA, 165 nt, synthetic construct
  source 1..165: mol_type = other RNA
ggctcagccaggtagtactggttttagagctagaaatagcaagttaaaataaggctagtccgttatcaacttgaaaaagtggcaccgagtcggtgctacgcagccccttcgagtacccacagtactacctggctgaacattgacgcgtctctacgtgggggcgcg

SEQ ID NO: 1428 - RNA, 166 nt, synthetic construct
  source 1..166: mol_type = other RNA
ggctcagccaggtagtactggttttagagctagaaatagcaagttaaaataaggctagtccgttatcaacttgaaaaagtggcaccgagtcggtgctacgcagccccttcgagtacccacagtactacctggctgaaacattgacgcgtctctacgtgggggcgcg

SEQ ID NO: 1429 - RNA, 166 nt, synthetic construct
  source 1..166: mol_type = other RNA
ggctcagccaggtagtactggttttagagctagaaatagcaagttaaaataaggctagtccgttatcaacttgaaaaagtggcaccgagtcggtgcggtacgcagccccttcgagtacccacagtactacctggctaacattgacgcgtctctacgtgggggcgcg

SEQ ID NO: 1430 - RNA, 166 nt, synthetic construct
  source 1..166: mol_type = other RNA
ggctcagccaggtagtactggttttagagctagaaatagcaagttaaaataaggctagtccgttatcaacttgaaaaagtggcaccgagtcggtgcgtggtacgcagccccttcgagtacccacagtactacctggaacattgacgcgtctctacgtgggggcgcg

SEQ ID NO: 1431 - RNA, 167 nt, synthetic construct
  source 1..167: mol_type = other RNA
ggctcagccaggtagtactggttttagagctagaaatagcaagttaaaataaggctagtccgttatcaacttgaaaaagtggcaccgagtcggtgctacgcagccccttcgagtacccacagtactacctggctgagaacattgacgcgtctctacgtgggggcgcg

SEQ ID NO: 1432 - RNA, 168 nt, synthetic construct
  source 1..168: mol_type = other RNA
ggctcagccaggtagtactggttttagagctagaaatagcaagttaaaataaggctagtccgttatcaacttgaaaaagtggcaccgagtcggtgcggtacgcagccccttcgagtacccacagtactacctggctgaaacattgacgcgtctctacgtgggggcgcg

SEQ ID NO: 1433 - RNA, 168 nt, synthetic construct
  source 1..168: mol_type = other RNA
ggctcagccaggtagtactggttttagagctagaaatagcaagttaaaataaggctagtccgttatcaacttgaaaaagtggcaccgagtcggtgcgtggtacgcagccccttcgagtacccacagtactacctggctaacattgacgcgtctctacgtgggggcgcg

SEQ ID NO: 1434 - RNA, 168 nt, synthetic construct
  source 1..168: mol_type = other RNA
ggctcagccaggtagtactggttttagagctagaaatagcaagttaaaataaggctagtccgttatcaacttgaaaaagtggcaccgagtcggtgctacgcagccccttcgagtacccacagtactacctggctgagcaacattgacgcgtctctacgtgggggcgcg

SEQ ID NO: 1435 - RNA, 170 nt, synthetic construct
  source 1..170: mol_type = other RNA
ggctcagccaggtagtactggttttagagctagaaatagcaagttaaaataaggctagtccgttatcaacttgaaaaagtggcaccgagtcggtgcgtggtacgcagccccttcgagtacccacagtactacctggctgaaacattgacgcgtctctacgtgggggcgcg

SEQ ID NO: 1436 - RNA, 17 nt, synthetic construct
  source 1..17: mol_type = other RNA
cccttctccaatgcgac

SEQ ID NO: 1437 - RNA, 18 nt, synthetic construct
  source 1..18: mol_type = other RNA
gcccttctccaatgcgac

SEQ ID NO: 1438 - RNA, 19 nt, synthetic construct
  source 1..19: mol_type = other RNA
tgcccttctccaatgcgac

SEQ ID NO: 1439 - RNA, 21 nt, synthetic construct
  source 1..21: mol_type = other RNA
cgtgcccttctccaatgcgac

SEQ ID NO: 1440 - RNA, 22 nt, synthetic construct
  source 1..22: mol_type = other RNA
acgtgcccttctccaatgcgac

SEQ ID NO: 1441-1445 - skipped (5 entries)

SEQ ID NO: 1446 - RNA, 10 nt, synthetic construct
  source 1..10: mol_type = other RNA
gcattggaga

SEQ ID NO: 1447 - RNA, 11 nt, synthetic construct
  source 1..11: mol_type = other RNA
gcattggagaa

SEQ ID NO: 1448 - RNA, 12 nt, synthetic construct
  source 1..12: mol_type = other RNA
gcattggagaag

SEQ ID NO: 1449 - RNA, 13 nt, synthetic construct
  source 1..13: mol_type = other RNA
gcattggagaagg

SEQ ID NO: 1450 - RNA, 14 nt, synthetic construct
  source 1..14: mol_type = other RNA
gcattggagaaggg

SEQ ID NO: 1451 - RNA, 15 nt, synthetic construct
  source 1..15: mol_type = other RNA
gcattggagaagggc

SEQ ID NO: 1452 - RNA, 16 nt, synthetic construct
  source 1..16: mol_type = other RNA
gcattggagaagggca

SEQ ID NO: 1453 - RNA, 17 nt, synthetic construct
  source 1..17: mol_type = other RNA
gcattggagaagggcac

SEQ ID NO: 1454 - RNA, 18 nt, synthetic construct
  source 1..18: mol_type = other RNA
gcattggagaagggcacg

SEQ ID NO: 1455 - RNA, 19 nt, synthetic construct
  source 1..19: mol_type = other RNA
gcattggagaagggcacgt

SEQ ID NO: 1456 - RNA, 21 nt, synthetic construct
  source 1..21: mol_type = other RNA
gggctgcgtaccacacccgtc

SEQ ID NO: 1457 - RNA, 22 nt, synthetic construct
  source 1..22: mol_type = other RNA
ggggctgcgtaccacacccgtc

SEQ ID NO: 1458 - RNA, 23 nt, synthetic construct
  source 1..23: mol_type = other RNA
aggggctgcgtaccacacccgtc

SEQ ID NO: 1459 - RNA, 24 nt, synthetic construct
  source 1..24: mol_type = other RNA
aaggggctgcgtaccacacccgtc

SEQ ID NO: 1460 - RNA, 25 nt, synthetic construct
  source 1..25: mol_type = other RNA
gaaggggctgcgtaccacacccgtc

SEQ ID NO: 1461 - RNA, 26 nt, synthetic construct
  source 1..26: mol_type = other RNA
cgaaggggctgcgtaccacacccgtc

SEQ ID NO: 1462 - RNA, 27 nt, synthetic construct
  source 1..27: mol_type = other RNA
tcgaaggggctgcgtaccacacccgtc

SEQ ID NO: 1463 - RNA, 28 nt, synthetic construct
  source 1..28: mol_type = other RNA
ctcgaaggggctgcgtaccacacccgtc

SEQ ID NO: 1464 - RNA, 29 nt, synthetic construct
  source 1..29: mol_type = other RNA
actcgaaggggctgcgtaccacacccgtc

SEQ ID NO: 1465 - RNA, 30 nt, synthetic construct
  source 1..30: mol_type = other RNA
tactcgaaggggctgcgtaccacacccgtc

SEQ ID NO: 1466 - RNA, 31 nt, synthetic construct
  source 1..31: mol_type = other RNA
gtactcgaaggggctgcgtaccacacccgtc

SEQ ID NO: 1467 - RNA, 32 nt, synthetic construct
  source 1..32: mol_type = other RNA
ggtactcgaaggggctgcgtaccacacccgtc

SEQ ID NO: 1468 - RNA, 33 nt, synthetic construct
  source 1..33: mol_type = other RNA
gggtactcgaaggggctgcgtaccacacccgtc

SEQ ID NO: 1469 - RNA, 34 nt, synthetic construct
  source 1..34: mol_type = other RNA
tgggtactcgaaggggctgcgtaccacacccgtc

SEQ ID NO: 1470 - RNA, 35 nt, synthetic construct
  source 1..35: mol_type = other RNA
gtgggtactcgaaggggctgcgtaccacacccgtc

SEQ ID NO: 1471 - RNA, 36 nt, synthetic construct
  source 1..36: mol_type = other RNA
tgtgggtactcgaaggggctgcgtaccacacccgtc

SEQ ID NO: 1472 - RNA, 37 nt, synthetic construct
  source 1..37: mol_type = other RNA
ctgtgggtactcgaaggggctgcgtaccacacccgtc

SEQ ID NO: 1473 - RNA, 38 nt, synthetic construct
  source 1..38: mol_type = other RNA
actgtgggtactcgaaggggctgcgtaccacacccgtc

SEQ ID NO: 1474 - RNA, 39 nt, synthetic construct
  source 1..39: mol_type = other RNA
tactgtgggtactcgaaggggctgcgtaccacacccgtc

SEQ ID NO: 1475 - RNA, 40 nt, synthetic construct
  source 1..40: mol_type = other RNA
gtactgtgggtactcgaaggggctgcgtaccacacccgtc

SEQ ID NO: 1476 - RNA, 129 nt, synthetic construct
  source 1..129: mol_type = other RNA
gtgcccttctccaatgcgacgttttagagctagaaatagcaagttaaaataaggctagtccgttatcaacttgaaaaagtggcaccgagtcggtgcgaaggggctgcgtaccacacccgtcgcattgga

SEQ ID NO: 1477 - RNA, 131 nt, synthetic construct
  source 1..131: mol_type = other RNA
gtgcccttctccaatgcgacgttttagagctagaaatagcaagttaaaataaggctagtccgttatcaacttgaaaaagtggcaccgagtcggtgctcgaaggggctgcgtaccacacccgtcgcattgga

SEQ ID NO: 1478 - RNA, 131 nt, synthetic construct
  source 1..131: mol_type = other RNA
gtgcccttctccaatgcgacgttttagagctagaaatagcaagttaaaataaggctagtccgttatcaacttgaaaaagtggcaccgagtcggtgcgaaggggctgcgtaccacacccgtcgcattggaga

SEQ ID NO: 1479 - RNA, 133 nt, synthetic construct
  source 1..133: mol_type = other RNA
gtgcccttctccaatgcgacgttttagagctagaaatagcaagttaaaataaggctagtccgttatcaacttgaaaaagtggcaccgagtcggtgcgaaggggctgcgtaccacacccgtcgcattggatttt

SEQ ID NO: 1480 - RNA, 133 nt, synthetic construct
  source 1..133: mol_type = other RNA
gtgcccttctccaatgcgacgttttagagctagaaatagcaagttaaaataaggctagtccgttatcaacttgaaaaagtggcaccgagtcggtgcactcgaaggggctgcgtaccacacccgtcgcattgga

SEQ ID NO: 1481 - RNA, 133 nt, synthetic construct
  source 1..133: mol_type = other RNA
gtgcccttctccaatgcgacgttttagagctagaaatagcaagttaaaataaggctagtccgttatcaacttgaaaaagtggcaccgagtcggtgctcgaaggggctgcgtaccacacccgtcgcattggaga

SEQ ID NO: 1482 - RNA, 133 nt, synthetic construct
  source 1..133: mol_type = other RNA
gtgcccttctccaatgcgacgttttagagctagaaatagcaagttaaaataaggctagtccgttatcaacttgaaaaagtggcaccgagtcggtgcgaaggggctgcgtaccacacccgtcgcattggagaag

SEQ ID NO: 1483 - RNA, 134 nt, synthetic construct
  source 1..134: mol_type = other RNA
gtgcccttctccaatgcgacgttttagagctagaaatagcaagttaaaataaggctagtccgttatcaacttgaaaaagtggcaccgagtcggtgctactcgaaggggctgcgtaccacacccgtcgcattgga

SEQ ID NO: 1484 - RNA, 135 nt, synthetic construct
  source 1..135: mol_type = other RNA
gtgcccttctccaatgcgacgttttagagctagaaatagcaagttaaaataaggctagtccgttatcaacttgaaaaagtggcaccgagtcggtgctcgaaggggctgcgtaccacacccgtcgcattggatttt

SEQ ID NO: 1485 - RNA, 135 nt, synthetic construct
  source 1..135: mol_type = other RNA
gtgcccttctccaatgcgacgttttagagctagaaatagcaagttaaaataaggctagtccgttatcaacttgaaaaagtggcaccgagtcggtgcgaaggggctgcgtaccacacccgtcgcattggagatttt

SEQ ID NO: 1486 - RNA, 135 nt, synthetic construct
  source 1..135: mol_type = other RNA
gtgcccttctccaatgcgacgttttagagctagaaatagcaagttaaaataaggctagtccgttatcaacttgaaaaagtggcaccgagtcggtgcgtactcgaaggggctgcgtaccacacccgtcgcattgga

SEQ ID NO: 1487 - RNA, 135 nt, synthetic construct
  source 1..135: mol_type = other RNA
gtgcccttctccaatgcgacgttttagagctagaaatagcaagttaaaataaggctagtccgttatcaacttgaaaaagtggcaccgagtcggtgcactcgaaggggctgcgtaccacacccgtcgcattggaga

SEQ ID NO: 1488 - RNA, 135 nt, synthetic construct
  source 1..135: mol_type = other RNA
gtgcccttctccaatgcgacgttttagagctagaaatagcaagttaaaataaggctagtccgttatcaacttgaaaaagtggcaccgagtcggtgctcgaaggggctgcgtaccacacccgtcgcattggagaag

SEQ ID NO: 1489 - RNA, 135 nt, synthetic construct
  source 1..135: mol_type = other RNA
gtgcccttctccaatgcgacgttttagagctagaaatagcaagttaaaataaggctagtccgttatcaacttgaaaaagtggcaccgagtcggtgcgaaggggctgcgtaccacacccgtcgcattggagaaggg

SEQ ID NO: 1490 - RNA, 136 nt, synthetic construct
  source 1..136: mol_type = other RNA
gtgcccttctccaatgcgacgttttagagctagaaatagcaagttaaaataaggctagtccgttatcaacttgaaaaagtggcaccgagtcggtgctactcgaaggggctgcgtaccacacccgtcgcattggaga

SEQ ID NO: 1491 - RNA, 137 nt, synthetic construct
  source 1..137: mol_type = other RNA
gtgcccttctccaatgcgacgttttagagctagaaatagcaagttaaaataaggctagtccgttatcaacttgaaaaagtggcaccgagtcggtgcactcgaaggggctgcgtaccacacccgtcgcattggatttt

SEQ ID NO: 1492 - RNA, 137 nt, synthetic construct
  source 1..137: mol_type = other RNA
gtgcccttctccaatgcgacgttttagagctagaaatagcaagttaaaataaggctagtccgttatcaacttgaaaaagtggcaccgagtcggtgctcgaaggggctgcgtaccacacccgtcgcattggagatttt

SEQ ID NO: 1493 - RNA, 137 nt, synthetic construct
  source 1..137: mol_type = other RNA
gtgcccttctccaatgcgacgttttagagctagaaatagcaagttaaaataaggctagtccgttatcaacttgaaaaagtggcaccgagtcggtgcgaaggggctgcgtaccacacccgtcgcattggagaagtttt

SEQ ID NO: 1494 - RNA, 137 nt, synthetic construct
  source 1..137: mol_type = other RNA
gtgcccttctccaatgcgacgttttagagctagaaatagcaagttaaaataaggctagtccgttatcaacttgaaaaagtggcaccgagtcggtgcgtactcgaaggggctgcgtaccacacccgtcgcattggaga

SEQ ID NO: 1495 - RNA, 137 nt, synthetic construct
  source 1..137: mol_type = other RNA
gtgcccttctccaatgcgacgttttagagctagaaatagcaagttaaaataaggctagtccgttatcaacttgaaaaagtggcaccgagtcggtgcactcgaaggggctgcgtaccacacccgtcgcattggagaag

SEQ ID NO: 1496 - RNA, 137 nt, synthetic construct
  source 1..137: mol_type = other RNA
gtgcccttctccaatgcgacgttttagagctagaaatagcaagttaaaataaggctagtccgttatcaacttgaaaaagtggcaccgagtcggtgctcgaaggggctgcgtaccacacccgtcgcattggagaaggg

SEQ ID NO: 1497 - RNA, 138 nt, synthetic construct
  source 1..138: mol_type = other RNA
gtgcccttctccaatgcgacgttttagagctagaaatagcaagttaaaataaggctagtccgttatcaacttgaaaaagtggcaccgagtcggtgctactcgaaggggctgcgtaccacacccgtcgcattggagaag

SEQ ID NO: 1498 - RNA, 139 nt, synthetic construct
  source 1..139: mol_type = other RNA
gtgcccttctccaatgcgacgttttagagctagaaatagcaagttaaaataaggctagtccgttatcaacttgaaaaagtggcaccgagtcggtgcgtactcgaaggggctgcgtaccacacccgtcgcattggatttt

SEQ ID NO: 1499 - RNA, 139 nt, synthetic construct
  source 1..139: mol_type = other RNA
gtgcccttctccaatgcgacgttttagagctagaaatagcaagttaaaataaggctagtccgttatcaacttgaaaaagtggcaccgagtcggtgcactcgaaggggctgcgtaccacacccgtcgcattggagatttt

SEQ ID NO: 1500 - RNA, 139 nt, synthetic construct
  source 1..139: mol_type = other RNA
gtgcccttctccaatgcgacgttttagagctagaaatagcaagttaaaataaggctagtccgttatcaacttgaaaaagtggcaccgagtcggtgctcgaaggggctgcgtaccacacccgtcgcattggagaagtttt

SEQ ID NO: 1501 - RNA, 139 nt, synthetic construct
  source 1..139: mol_type = other RNA
gtgcccttctccaatgcgacgttttagagctagaaatagcaagttaaaataaggctagtccgttatcaacttgaaaaagtggcaccgagtcggtgcgaaggggctgcgtaccacacccgtcgcattggagaagggtttt

SEQ ID NO: 1502 - RNA, 139 nt, synthetic construct
  source 1..139: mol_type = other RNA
gtgcccttctccaatgcgacgttttagagctagaaatagcaagttaaaataaggctagtccgttatcaacttgaaaaagtggcaccgagtcggtgcgtactcgaaggggctgcgtaccacacccgtcgcattggagaag

SEQ ID NO: 1503 - RNA, 139 nt, synthetic construct
  source 1..139: mol_type = other RNA
gtgcccttctccaatgcgacgttttagagctagaaatagcaagttaaaataaggctagtccgttatcaacttgaaaaagtggcaccgagtcggtgcactcgaaggggctgcgtaccacacccgtcgcattggagaaggg

SEQ ID NO: 1504 - RNA, 140 nt, synthetic construct
  source 1..140: mol_type = other RNA
gtgcccttctccaatgcgacgttttagagctagaaatagcaagttaaaataaggctagtccgttatcaacttgaaaaagtggcaccgagtcggtgctactcgaaggggctgcgtaccacacccgtcgcattggagaaggg

SEQ ID NO: 1505 - RNA, 141 nt, synthetic construct
  source 1..141: mol_type = other RNA
gtgcccttctccaatgcgacgttttagagctagaaatagcaagttaaaataaggctagtccgttatcaacttgaaaaagtggcaccgagtcggtgcgtactcgaaggggctgcgtaccacacccgtcgcattggagatttt

SEQ ID NO: 1506 - RNA, 141 nt, synthetic construct
  source 1..141: mol_type = other RNA
gtgcccttctccaatgcgacgttttagagctagaaatagcaagttaaaataaggctagtccgttatcaacttgaaaaagtggcaccgagtcggtgcactcgaaggggctgcgtaccacacccgtcgcattggagaagtttt

SEQ ID NO: 1507 - RNA, 141 nt, synthetic construct
  source 1..141: mol_type = other RNA
gtgcccttctccaatgcgacgttttagagctagaaatagcaagttaaaataaggctagtccgttatcaacttgaaaaagtggcaccgagtcggtgctcgaaggggctgcgtaccacacccgtcgcattggagaagggtttt

SEQ ID NO: 1508 - RNA, 141 nt, synthetic construct
  source 1..141: mol_type = other RNA
gtgcccttctccaatgcgacgttttagagctagaaatagcaagttaaaataaggctagtccgttatcaacttgaaaaagtggcaccgagtcggtgcgtactcgaaggggctgcgtaccacacccgtcgcattggagaaggg

SEQ ID NO: 1509 - RNA, 143 nt, synthetic construct
  source 1..143: mol_type = other RNA
gtgcccttctccaatgcgacgttttagagctagaaatagcaagttaaaataaggctagtccgttatcaacttgaaaaagtggcaccgagtcggtgcgtactcgaaggggctgcgtaccacacccgtcgcattggagaagtttt

SEQ ID NO: 1510 - RNA, 143 nt, synthetic construct
  source 1..143: mol_type = other RNA
gtgcccttctccaatgcgacgttttagagctagaaatagcaagttaaaataaggctagtccgttatcaacttgaaaaagtggcaccgagtcggtgcactcgaaggggctgcgtaccacacccgtcgcattggagaagggtttt

SEQ ID NO: 1511 - RNA, 145 nt, synthetic construct
  source 1..145: mol_type = other RNA
gtgcccttctccaatgcgacgttttagagctagaaatagcaagttaaaataaggctagtccgttatcaacttgaaaaagtggcaccgagtcggtgcgtactcgaaggggctgcgtaccacacccgtcgcattggagaagggtttt

SEQ ID NO: 1512 - RNA, 164 nt, synthetic construct
  source 1..164: mol_type = other RNA
gtgcccttctccaatgcgacgttttagagctagaaatagcaagttaaaataaggctagtccgttatcaacttgaaaaagtggcaccgagtcggtgctactcgaaggggctgcgtaccacacccgtcgcattggaaacattgacgcgtctctacgtgggggcgcg

SEQ ID NO: 1513 - RNA, 166 nt, synthetic construct
  source 1..166: mol_type = other RNA
gtgcccttctccaatgcgacgttttagagctagaaatagcaagttaaaataaggctagtccgttatcaacttgaaaaagtggcaccgagtcggtgctactcgaaggggctgcgtaccacacccgtcgcattggagaaacattgacgcgtctctacgtgggggcgcg

SEQ ID NO: 1514 - RNA, 168 nt, synthetic construct
  source 1..168: mol_type = other RNA
gtgcccttctccaatgcgacgttttagagctagaaatagcaagttaaaataaggctagtccgttatcaacttgaaaaagtggcaccgagtcggtgctactcgaaggggctgcgtaccacacccgtcgcattggagaagaacattgacgcgtctctacgtgggggcgcg

SEQ ID NO: 1515 - RNA, 170 nt, synthetic construct
  source 1..170: mol_type = other RNA
gtgcccttctccaatgcgacgttttagagctagaaatagcaagttaaaataaggctagtccgttatcaacttgaaaaagtggcaccgagtcggtgctactcgaaggggctgcgtaccacacccgtcgcattggagaagggaacattgacgcgtctctacgtgggggcgcg

SEQ ID NO: 1516 - RNA, 17 nt, synthetic construct
  source 1..17: mol_type = other RNA
actgccatggctcagcc

SEQ ID NO: 1517 - RNA, 18 nt, synthetic construct
  source 1..18: mol_type = other RNA
aactgccatggctcagcc

SEQ ID NO: 1518 - RNA, 19 nt, synthetic construct
  source 1..19: mol_type = other RNA
gaactgccatggctcagcc

SEQ ID NO: 1519 - RNA, 21 nt, synthetic construct
  source 1..21: mol_type = other RNA
gagaactgccatggctcagcc

SEQ ID NO: 1520 - RNA, 22 nt, synthetic construct
  source 1..22: mol_type = other RNA
ggagaactgccatggctcagcc

SEQ ID NO: 1521-1525 - skipped (5 entries)

SEQ ID NO: 1526 - RNA, 10 nt, synthetic construct
  source 1..10: mol_type = other RNA
tgagccatgg

SEQ ID NO: 1527 - RNA, 11 nt, synthetic construct
  source 1..11: mol_type = other RNA
tgagccatggc

SEQ ID NO: 1528 - RNA, 12 nt, synthetic construct
  source 1..12: mol_type = other RNA
tgagccatggca

SEQ ID NO: 1529 - RNA, 13 nt, synthetic construct
  source 1..13: mol_type = other RNA
tgagccatggcag

SEQ ID NO: 1530 - RNA, 14 nt, synthetic construct
  source 1..14: mol_type = other RNA
tgagccatggcagt

SEQ ID NO: 1531 - RNA, 15 nt, synthetic construct
  source 1..15: mol_type = other RNA
tgagccatggcagtt

SEQ ID NO: 1532 - RNA, 16 nt, synthetic construct
  source 1..16: mol_type = other RNA
tgagccatggcagttc

SEQ ID NO: 1533 - RNA, 17 nt, synthetic construct
  source 1..17: mol_type = other RNA
tgagccatggcagttct

SEQ ID NO: 1534 - RNA, 18 nt, synthetic construct
  source 1..18: mol_type = other RNA
tgagccatggcagttctc

SEQ ID NO: 1535 - RNA, 19 nt, synthetic construct
  source 1..19: mol_type = other RNA
tgagccatggcagttctcc

SEQ ID NO: 1536 - RNA, 28 nt, synthetic construct
  source 1..28: mol_type = other RNA
ccttcgagtacccacagtactacctggc

SEQ ID NO: 1537 - RNA, 28 nt, synthetic construct
  source 1..28: mol_type = other RNA
ccttcgagtacccacagtactacttagc

SEQ ID NO: 1538 - RNA, 28 nt, synthetic construct
  source 1..28: mol_type = other RNA
ccttcgagtacccacagtactacttggc

SEQ ID NO: 1539 - RNA, 28 nt, synthetic construct
  source 1..28: mol_type = other RNA
ccttcgagtacccacagtactatctggc

SEQ ID NO: 1540 - RNA, 28 nt, synthetic construct
  source 1..28: mol_type = other RNA
ccttcgagtacccacagtactatttagc

SEQ ID NO: 1541 - RNA, 28 nt, synthetic construct
  source 1..28: mol_type = other RNA
ccttcgagtacccacagtactatttggc

SEQ ID NO: 1542 - RNA, 29 nt, synthetic construct
  source 1..29: mol_type = other RNA
cccttcgagtacccacagtactacctggc

SEQ ID NO: 1543 - RNA, 29 nt, synthetic construct
  source 1..29: mol_type = other RNA
cccttcgagtacccacagtactacttagc

SEQ ID NO: 1544 - RNA, 29 nt, synthetic construct
  source 1..29: mol_type = other RNA
cccttcgagtacccacagtactacttggc

SEQ ID NO: 1545 - RNA, 29 nt, synthetic construct
  source 1..29: mol_type = other RNA
cccttcgagtacccacagtactatctggc

SEQ ID NO: 1546 - RNA, 29 nt, synthetic construct
  source 1..29: mol_type = other RNA
cccttcgagtacccacagtactatttagc

SEQ ID NO: 1547 - RNA, 29 nt, synthetic construct
  source 1..29: mol_type = other RNA
cccttcgagtacccacagtactatttggc

SEQ ID NO: 1548 - RNA, 30 nt, synthetic construct
  source 1..30: mol_type = other RNA
ccccttcgagtacccacagtactacctggc

SEQ ID NO: 1549 - RNA, 30 nt, synthetic construct
  source 1..30: mol_type = other RNA
ccccttcgagtacccacagtactacttagc

SEQ ID NO: 1550 - RNA, 30 nt, synthetic construct
  source 1..30: mol_type = other RNA
ccccttcgagtacccacagtactacttggc

SEQ ID NO: 1551 - RNA, 30 nt, synthetic construct
  source 1..30: mol_type = other RNA
ccccttcgagtacccacagtactatctggc

SEQ ID NO: 1552 - RNA, 30 nt, synthetic construct
  source 1..30: mol_type = other RNA
ccccttcgagtacccacagtactatttagc

SEQ ID NO: 1553 - RNA, 30 nt, synthetic construct
  source 1..30: mol_type = other RNA
ccccttcgagtacccacagtactatttggc

SEQ ID NO: 1554 - RNA, 31 nt, synthetic construct
  source 1..31: mol_type = other RNA
gccccttcgagtacccacagtactacctggc

SEQ ID NO: 1555 - RNA, 31 nt, synthetic construct
  source 1..31: mol_type = other RNA
gccccttcgagtacccacagtactacttagc

SEQ ID NO: 1556 - RNA, 31 nt, synthetic construct
  source 1..31: mol_type = other RNA
gccccttcgagtacccacagtactacttggc

SEQ ID NO: 1557 - RNA, 31 nt, synthetic construct
  source 1..31: mol_type = other RNA
gccccttcgagtacccacagtactatctggc

SEQ ID NO: 1558 - RNA, 31 nt, synthetic construct
  source 1..31: mol_type = other RNA
gccccttcgagtacccacagtactatttagc

SEQ ID NO: 1559 - RNA, 31 nt, synthetic construct
  source 1..31: mol_type = other RNA
gccccttcgagtacccacagtactatttggc

SEQ ID NO: 1560 - RNA, 32 nt, synthetic construct
  source 1..32: mol_type = other RNA
agccccttcgagtacccacagtactacctggc

SEQ ID NO: 1561 - RNA, 32 nt, synthetic construct
  source 1..32: mol_type = other RNA
agccccttcgagtacccacagtactacttagc

SEQ ID NO: 1562 - RNA, 32 nt, synthetic construct
  source 1..32: mol_type = other RNA
agccccttcgagtacccacagtactacttggc

SEQ ID NO: 1563 - RNA, 32 nt, synthetic construct
  source 1..32: mol_type = other RNA
agccccttcgagtacccacagtactatctggc

SEQ ID NO: 1564 - RNA, 32 nt, synthetic construct
  source 1..32: mol_type = other RNA
agccccttcgagtacccacagtactatttagc

SEQ ID NO: 1565 - RNA, 32 nt, synthetic construct
  source 1..32: mol_type = other RNA
agccccttcgagtacccacagtactatttggc

SEQ ID NO: 1566 - RNA, 33 nt, synthetic construct
  source 1..33: mol_type = other RNA
cagccccttcgagtacccacagtactacctggc

SEQ ID NO: 1567 - RNA, 33 nt, synthetic construct
  source 1..33: mol_type = other RNA
cagccccttcgagtacccacagtactacttagc

SEQ ID NO: 1568 - RNA, 33 nt, synthetic construct
  source 1..33: mol_type = other RNA
cagccccttcgagtacccacagtactacttggc

SEQ ID NO: 1569 - RNA, 33 nt, synthetic construct
  source 1..33: mol_type = other RNA
cagccccttcgagtacccacagtactatctggc

SEQ ID NO: 1570 - RNA, 33 nt, synthetic construct
  source 1..33: mol_type = other RNA
cagccccttcgagtacccacagtactatttagc

SEQ ID NO: 1571 - RNA, 33 nt, synthetic construct
  source 1..33: mol_type = other RNA
cagccccttcgagtacccacagtactatttggc

SEQ ID NO: 1572 - RNA, 34 nt, synthetic construct
  source 1..34: mol_type = other RNA
gcagccccttcgagtacccacagtactacctggc

SEQ ID NO: 1573 - RNA, 34 nt, synthetic construct
  source 1..34: mol_type = other RNA
gcagccccttcgagtacccacagtactacttagc

SEQ ID NO: 1574 - RNA, 34 nt, synthetic construct
  source 1..34: mol_type = other RNA
gcagccccttcgagtacccacagtactacttggc

SEQ ID NO: 1575 - RNA, 34 nt, synthetic construct
  source 1..34: mol_type = other RNA
gcagccccttcgagtacccacagtactatctggc

SEQ ID NO: 1576 - RNA, 34 nt, synthetic construct
  source 1..34: mol_type = other RNA
gcagccccttcgagtacccacagtactatttagc

SEQ ID NO: 1577 - RNA, 34 nt, synthetic construct
  source 1..34: mol_type = other RNA
gcagccccttcgagtacccacagtactatttggc

SEQ ID NO: 1578 - RNA, 35 nt, synthetic construct
  source 1..35: mol_type = other RNA
cgcagccccttcgagtacccacagtactacctggc

SEQ ID NO: 1579 - RNA, 35 nt, synthetic construct
  source 1..35: mol_type = other RNA
cgcagccccttcgagtacccacagtactacttagc

SEQ ID NO: 1580 - RNA, 35 nt, synthetic construct
  source 1..35: mol_type = other RNA
cgcagccccttcgagtacccacagtactacttggc

SEQ ID NO: 1581 - RNA, 35 nt, synthetic construct
  source 1..35: mol_type = other RNA
cgcagccccttcgagtacccacagtactatctggc

SEQ ID NO: 1582 - RNA, 35 nt, synthetic construct
  source 1..35: mol_type = other RNA
cgcagccccttcgagtacccacagtactatttagc

SEQ ID NO: 1583 - RNA, 35 nt, synthetic construct
  source 1..35: mol_type = other RNA
cgcagccccttcgagtacccacagtactatttggc

SEQ ID NO: 1584 - RNA, 36 nt, synthetic construct
  source 1..36: mol_type = other RNA
acgcagccccttcgagtacccacagtactacctggc

SEQ ID NO: 1585 - RNA, 36 nt, synthetic construct
  source 1..36: mol_type = other RNA
acgcagccccttcgagtacccacagtactacttagc

SEQ ID NO: 1586 - RNA, 36 nt, synthetic construct
  source 1..36: mol_type = other RNA
acgcagccccttcgagtacccacagtactacttggc

SEQ ID NO: 1587 - RNA, 36 nt, synthetic construct
  source 1..36: mol_type = other RNA
acgcagccccttcgagtacccacagtactatctggc

SEQ ID NO: 1588 - RNA, 36 nt, synthetic construct
  source 1..36: mol_type = other RNA
acgcagccccttcgagtacccacagtactatttagc

SEQ ID NO: 1589 - RNA, 36 nt, synthetic construct
  source 1..36: mol_type = other RNA
acgcagccccttcgagtacccacagtactatttggc

SEQ ID NO: 1590 - RNA, 37 nt, synthetic construct
  source 1..37: mol_type = other RNA
tacgcagccccttcgagtacccacagtactacctggc

SEQ ID NO: 1591 - RNA, 37 nt, synthetic construct
  source 1..37: mol_type = other RNA
tacgcagccccttcgagtacccacagtactacttagc

SEQ ID NO: 1592 - RNA, 37 nt, synthetic construct
  source 1..37: mol_type = other RNA
tacgcagccccttcgagtacccacagtactacttggc

SEQ ID NO: 1593 - RNA, 37 nt, synthetic construct
  source 1..37: mol_type = other RNA
tacgcagccccttcgagtacccacagtactatctggc

SEQ ID NO: 1594 - RNA, 37 nt, synthetic construct
  source 1..37: mol_type = other RNA
tacgcagccccttcgagtacccacagtactatttagc

SEQ ID NO: 1595 - RNA, 37 nt, synthetic construct
  source 1..37: mol_type = other RNA
tacgcagccccttcgagtacccacagtactatttggc

SEQ ID NO: 1596 - RNA, 38 nt, synthetic construct
  source 1..38: mol_type = other RNA
gtacgcagccccttcgagtacccacagtactacctggc

SEQ ID NO: 1597 - RNA, 38 nt, synthetic construct
  source 1..38: mol_type = other RNA
gtacgcagccccttcgagtacccacagtactacttagc

SEQ ID NO: 1598 - RNA, 38 nt, synthetic construct
  source 1..38: mol_type = other RNA
gtacgcagccccttcgagtacccacagtactacttggc

SEQ ID NO: 1599 - RNA, 38 nt, synthetic construct
  source 1..38: mol_type = other RNA
gtacgcagccccttcgagtacccacagtactatctggc

SEQ ID NO: 1600 - RNA, 38 nt, synthetic construct
  source 1..38: mol_type = other RNA
gtacgcagccccttcgagtacccacagtactatttagc

SEQ ID NO: 1601 - RNA, 38 nt, synthetic construct
  source 1..38: mol_type = other RNA
gtacgcagccccttcgagtacccacagtactatttggc

SEQ ID NO: 1602 - RNA, 39 nt, synthetic construct
  source 1..39: mol_type = other RNA
ggtacgcagccccttcgagtacccacagtactacctggc

SEQ ID NO: 1603 - RNA, 39 nt, synthetic construct
  source 1..39: mol_type = other RNA
ggtacgcagccccttcgagtacccacagtactacttagc

SEQ ID NO: 1604 - RNA, 39 nt, synthetic construct
  source 1..39: mol_type = other RNA
ggtacgcagccccttcgagtacccacagtactacttggc

SEQ ID NO: 1605 - RNA, 39 nt, synthetic construct
  source 1..39: mol_type = other RNA
ggtacgcagccccttcgagtacccacagtactatctggc

SEQ ID NO: 1606 - RNA, 39 nt, synthetic construct
  source 1..39: mol_type = other RNA
ggtacgcagccccttcgagtacccacagtactatttagc

SEQ ID NO: 1607 - RNA, 39 nt, synthetic construct
  source 1..39: mol_type = other RNA
ggtacgcagccccttcgagtacccacagtactatttggc

SEQ ID NO: 1608 - RNA, 40 nt, synthetic construct
  source 1..40: mol_type = other RNA
tggtacgcagccccttcgagtacccacagtactacctggc

SEQ ID NO: 1609 - RNA, 40 nt, synthetic construct
  source 1..40: mol_type = other RNA
tggtacgcagccccttcgagtacccacagtactacttagc

SEQ ID NO: 1610 - RNA, 40 nt, synthetic construct
  source 1..40: mol_type = other RNA
tggtacgcagccccttcgagtacccacagtactacttggc

SEQ ID NO: 1611 - RNA, 40 nt, synthetic construct
  source 1..40: mol_type = other RNA
tggtacgcagccccttcgagtacccacagtactatctggc

SEQ ID NO: 1612 - RNA, 40 nt, synthetic construct
  source 1..40: mol_type = other RNA
tggtacgcagccccttcgagtacccacagtactatttagc

SEQ ID NO: 1613 - RNA, 40 nt, synthetic construct
  source 1..40: mol_type = other RNA
tggtacgcagccccttcgagtacccacagtactatttggc

SEQ ID NO: 1614 - RNA, 20 nt, synthetic construct
  source 1..20: mol_type = other RNA
cgagtacccacagtactact

SEQ ID NO: 1615 - RNA, 20 nt, synthetic construct
  source 1..20: mol_type = other RNA
cgagtacccacagtactatc

SEQ ID NO: 1616 - RNA, 20 nt, synthetic construct
  source 1..20: mol_type = other RNA
cgagtacccacagtactatt

SEQ ID NO: 1617 - RNA, 136 nt, synthetic construct
  source 1..136: mol_type = other RNA
agaactgccatggctcagccgttttagagctagaaatagcaagttaaaataaggctagtccgttatcaacttgaaaaagtggcaccgagtcggtgcagccccttcgagtacccacagtactacctggctgagccat

SEQ ID NO: 1618 - RNA, 138 nt, synthetic construct
  source 1..138: mol_type = other RNA
agaactgccatggctcagccgttttagagctagaaatagcaagttaaaataaggctagtccgttatcaacttgaaaaagtggcaccgagtcggtgcgcagccccttcgagtacccacagtactacctggctgagccat

SEQ ID NO: 1619 - RNA, 138 nt, synthetic construct
  source 1..138: mol_type = other RNA
agaactgccatggctcagccgttttagagctagaaatagcaagttaaaataaggctagtccgttatcaacttgaaaaagtggcaccgagtcggtgcagccccttcgagtacccacagtactacctggctgagccatgg

SEQ ID NO: 1620 - RNA, 140 nt, synthetic construct
  source 1..140: mol_type = other RNA
agaactgccatggctcagccgttttagagctagaaatagcaagttaaaataaggctagtccgttatcaacttgaaaaagtggcaccgagtcggtgcagccccttcgagtacccacagtactacctggctgagccattttt

SEQ ID NO: 1621 - RNA, 140 nt, synthetic construct
  source 1..140: mol_type = other RNA
agaactgccatggctcagccgttttagagctagaaatagcaagttaaaataaggctagtccgttatcaacttgaaaaagtggcaccgagtcggtgcacgcagccccttcgagtacccacagtactacctggctgagccat

SEQ ID NO: 1622 - RNA, 140 nt, synthetic construct
  source 1..140: mol_type = other RNA
agaactgccatggctcagccgttttagagctagaaatagcaagttaaaataaggctagtccgttatcaacttgaaaaagtggcaccgagtcggtgcgcagccccttcgagtacccacagtactacctggctgagccatgg

SEQ ID NO: 1623 - RNA, 140 nt, synthetic construct
  source 1..140: mol_type = other RNA
agaactgccatggctcagccgttttagagctagaaatagcaagttaaaataaggctagtccgttatcaacttgaaaaagtggcaccgagtcggtgcagccccttcgagtacccacagtactacctggctgagccatggca

SEQ ID NO: 1624 - RNA, 142 nt, synthetic construct
  source 1..142: mol_type = other RNA
agaactgccatggctcagccgttttagagctagaaatagcaagttaaaataaggctagtccgttatcaacttgaaaaagtggcaccgagtcggtgcgcagccccttcgagtacccacagtactacctggctgagccattttt

SEQ ID NO: 1625 - RNA, 142 nt, synthetic construct
  source 1..142: mol_type = other RNA
agaactgccatggctcagccgttttagagctagaaatagcaagttaaaataaggctagtccgttatcaacttgaaaaagtggcaccgagtcggtgcagccccttcgagtacccacagtactacctggctgagccatggtttt

SEQ ID NO: 1626 - RNA, 142 nt, synthetic construct
  source 1..142: mol_type = other RNA
agaactgccatggctcagccgttttagagctagaaatagcaagttaaaataaggctagtccgttatcaacttgaaaaagtggcaccgagtcggtgcgtacgcagccccttcgagtacccacagtactacctggctgagccat

SEQ ID NO: 1627 - RNA, 142 nt, synthetic construct
  source 1..142: mol_type = other RNA
agaactgccatggctcagccgttttagagctagaaatagcaagttaaaataaggctagtccgttatcaacttgaaaaagtggcaccgagtcggtgcacgcagccccttcgagtacccacagtactacctggctgagccatgg

SEQ ID NO: 1628 - RNA, 142 nt, synthetic construct
  source 1..142: mol_type = other RNA
agaactgccatggctcagccgttttagagctagaaatagcaagttaaaataaggctagtccgttatcaacttgaaaaagtggcaccgagtcggtgcgcagccccttcgagtacccacagtactacctggctgagccatggca

SEQ ID NO: 1629 - RNA, 142 nt, synthetic construct
  source 1..142: mol_type = other RNA
agaactgccatggctcagccgttttagagctagaaatagcaagttaaaataaggctagtccgttatcaacttgaaaaagtggcaccgagtcggtgcagccccttcgagtacccacagtactacctggctgagccatggcagt

SEQ ID NO: 1630 - RNA, 144 nt, synthetic construct
  source 1..144: mol_type = other RNA
agaactgccatggctcagccgttttagagctagaaatagcaagttaaaataaggctagtccgttatcaacttgaaaaagtggcaccgagtcggtgcacgcagccccttcgagtacccacagtactacctggctgagccattttt

SEQ ID NO: 1631 - RNA, 144 nt, synthetic construct
  source 1..144: mol_type = other RNA
agaactgccatggctcagccgttttagagctagaaatagcaagttaaaataaggctagtccgttatcaacttgaaaaagtggcaccgagtcggtgcgcagccccttcgagtacccacagtactacctggctgagccatggtttt

SEQ ID NO: 1632 - RNA, 144 nt, synthetic construct
  source 1..144: mol_type = other RNA
agaactgccatggctcagccgttttagagctagaaatagcaagttaaaataaggctagtccgttatcaacttgaaaaagtggcaccgagtcggtgcagccccttcgagtacccacagtactacctggctgagccatggcatttt

SEQ ID NO: 1633 - RNA, 144 nt, synthetic construct
  source 1..144: mol_type = other RNA
agaactgccatggctcagccgttttagagctagaaatagcaagttaaaataaggctagtccgttatcaacttgaaaaagtggcaccgagtcggtgcgtacgcagccccttcgagtacccacagtactacctggctgagccatgg

SEQ ID NO: 1634 - RNA, 144 nt, synthetic construct
  source 1..144: mol_type = other RNA
agaactgccatggctcagccgttttagagctagaaatagcaagttaaaataaggctagtccgttatcaacttgaaaaagtggcaccgagtcggtgcacgcagccccttcgagtacccacagtactacctggctgagccatggca

SEQ ID NO: 1635 - RNA, 144 nt, synthetic construct
  source 1..144: mol_type = other RNA
agaactgccatggctcagccgttttagagctagaaatagcaagttaaaataaggctagtccgttatcaacttgaaaaagtggcaccgagtcggtgcgcagccccttcgagtacccacagtactacctggctgagccatggcagt

SEQ ID NO: 1636 - RNA, 146 nt, synthetic construct
  source 1..146: mol_type = other RNA
agaactgccatggctcagccgttttagagctagaaatagcaagttaaaataaggctagtccgttatcaacttgaaaaagtggcaccgagtcggtgcgtacgcagccccttcgagtacccacagtactacctggctgagccattttt

SEQ ID NO: 1637 - RNA, 146 nt, synthetic construct
  source 1..146: mol_type = other RNA
agaactgccatggctcagccgttttagagctagaaatagcaagttaaaataaggctagtccgttatcaacttgaaaaagtggcaccgagtcggtgcacgcagccccttcgagtacccacagtactacctggctgagccatggtttt

SEQ ID NO: 1638 - RNA, 146 nt, synthetic construct
  source 1..146: mol_type = other RNA
agaactgccatggctcagccgttttagagctagaaatagcaagttaaaataaggctagtccgttatcaacttgaaaaagtggcaccgagtcggtgcgcagccccttcgagtacccacagtactacctggctgagccatggcatttt

SEQ ID NO: 1639 - RNA, 146 nt, synthetic construct
  source 1..146: mol_type = other RNA
agaactgccatggctcagccgttttagagctagaaatagcaagttaaaataaggctagtccgttatcaacttgaaaaagtggcaccgagtcggtgcagccccttcgagtacccacagtactacctggctgagccatggcagttttt

SEQ ID NO: 1640 - RNA, 146 nt, synthetic construct
  source 1..146: mol_type = other RNA
agaactgccatggctcagccgttttagagctagaaatagcaagttaaaataaggctagtccgttatcaacttgaaaaagtggcaccgagtcggtgcgtacgcagccccttcgagtacccacagtactacctggctgagccatggca

SEQ ID NO: 1641 - RNA, 146 nt, synthetic construct
  source 1..146: mol_type = other RNA
agaactgccatggctcagccgttttagagctagaaatagcaagttaaaataaggctagtccgttatcaacttgaaaaagtggcaccgagtcggtgcacgcagccccttcgagtacccacagtactacctggctgagccatggcagt

SEQ ID NO: 1642 - RNA, 148 nt, synthetic construct
  source 1..148: mol_type = other RNA
agaactgccatggctcagccgttttagagctagaaatagcaagttaaaataaggctagtccgttatcaacttgaaaaagtggcaccgagtcggtgcgtacgcagccccttcgagtacccacagtactacctggctgagccatggtttt

SEQ ID NO: 1643 - RNA, 148 nt, synthetic construct
  source 1..148: mol_type = other RNA
agaactgccatggctcagccgttttagagctagaaatagcaagttaaaataaggctagtccgttatcaacttgaaaaagtggcaccgagtcggtgcacgcagccccttcgagtacccacagtactacctggctgagccatggcatttt

SEQ ID NO: 1644 - RNA, 148 nt, synthetic construct
  source 1..148: mol_type = other RNA
agaactgccatggctcagccgttttagagctagaaatagcaagttaaaataaggctagtccgttatcaacttgaaaaagtggcaccgagtcggtgcgcagccccttcgagtacccacagtactacctggctgagccatggcagttttt

SEQ ID NO: 1645 - RNA, 150 nt, synthetic construct
  source 1..150: mol_type = other RNA
agaactgccatggctcagccgttttagagctagaaatagcaagttaaaataaggctagtccgttatcaacttgaaaaagtggcaccgagtcggtgcgtacgcagccccttcgagtacccacagtactacctggctgagccatggcatttt

SEQ ID NO: 1646 - RNA, 150 nt, synthetic construct
  source 1..150: mol_type = other RNA
agaactgccatggctcagccgttttagagctagaaatagcaagttaaaataaggctagtccgttatcaacttgaaaaagtggcaccgagtcggtgcacgcagccccttcgagtacccacagtactacctggctgagccatggcagttttt

SEQ ID NO: 1647-1849 - skipped (203 entries)

SEQ ID NO: 1850 - RNA, 22 nt, synthetic construct
  source 1..22: mol_type = other RNA
cgcgtctctacgtgggggcgcg

SEQ ID NO: 1851 - RNA, 22 nt, synthetic construct
  source 1..22: mol_type = other RNA
cgggtctctacgtgggggcccg

SEQ ID NO: 1852 - RNA, 22 nt, synthetic construct
  source 1..22: mol_type = other RNA
gcggcaccgtccgcccaaacgg

SEQ ID NO: 1853 - RNA, 37 nt, synthetic construct
  source 1..37: mol_type = other RNA
cgcggttctatctagttacgcgttaaaccaactagaa

SEQ ID NO: 1854 - RNA, 76 nt, synthetic construct
  source 1..76: mol_type = other RNA
gttttagagctagaaatagcaagttaaaataaggctagtccgttatcaacttgaaaaagtggcaccgagtcggtgc

SEQ ID NO: 1855 - RNA, 76 nt, synthetic construct
  source 1..76: mol_type = other RNA
gtttaagagctagaaatagcaagtttaaataaggctagtccgttatcaacttgaaaaagtggcaccgagtcggtgc

SEQ ID NO: 1856 - RNA, 76 nt, synthetic construct
  source 1..76: mol_type = other RNA
gtttaagagctagaaatagcaagtttaaataaggctagtccgttatcagcgtgaaaacgcggcaccgagtcggtgc

SEQ ID NO: 1857 - RNA, 78 nt, synthetic construct
  source 1..78: mol_type = other RNA
gtttaagagcggggaaatccgcaagtttaaataaggctagtccgttatcagcgtgaaaacgcggcaccgagtcggtgc

SEQ ID NO: 1858 - RNA, 86 nt, synthetic construct
  source 1..86: mol_type = other RNA
gtttaagagctatgctggaaacagcatagcaagtttaaataaggctagtccgttatcaacttgaaaaagtggcaccgagtcggtgc

SEQ ID NO: 1859 - RNA, 86 nt, synthetic construct
  source 1..86: mol_type = other RNA
gtttaagagctatgctggaaacagcatagcaagtttaaataaggctagtccgttatcagcgtgaaaacgcggcaccgagtcggtgc

SEQ ID NO: 1860-1861 - skipped (2 entries)

SEQ ID NO: 1862 - protein, 677 aa, Moloney murine leukemia virus
TLNIEDEHRLHETSKEPDVSLGSTWLSDFPQAWAETGGMGLAVRQAPLIIPLKATSTPVSIKQYPMSQEARLGIKPHIQRLLDQGILVPCQSPWNTPLLPVKKPGTNDYRPVQDLREVNKRVEDIHPTVPNPYNLLSGLPPSHQWYTVLDLKDAFFCLRLHPTSQPLFAFEWRDPEMGISGQLTWTRLPQGFKNSPTLFDEALHRDLADFRIQHPDLILLQYVDDLLLAATSELDCQQGTRALLQTLGNLGYRASAKKAQICQKQVKYLGYLLKEGQRWLTEARKETVMGQPTPKTPRQLREFLGTAGFCRLWIPGFAEMAAPLYPLTKTGTLFNWGPDQQKAYQEIKQALLTAPALGLPDLTKPFELFVDEKQGYAKGVLTQKLGPWRRPVAYLSKKLDPVAAGWPPCLRMVAAIAVLTKDAGKLTMGQPLVILAPHAVEALVKQPPDRWLSNARMTHYQALLLDTDRVQFGPVVALNPATLLPLPEEGLQHNCLDILAEAHGTRPDLTDQPLPDADHTWYTDGSSLLQEGQRKAGAAVTTETEVIWAKALPAGTSAQRAELIALTQALKMAEGKKLNVYTDSRYAFATAHIHGEIYRRRGLLTSEGKEIKNKDEILALLKALFLPKRLSIIHCPGHQKGHSAEARGNRMADQAARKAAITETPDTSTLLIENSSP

SEQ ID NO: 1863 - protein, 677 aa, synthetic construct
TLNIEDEYRLHETSKEPDVSLGSTWLSDFPQAWAETGGMGLAVRQAPLIIPLKATSTPVSIKQYPMSQEARLGIKPHIQRLLDQGILVPCQSPWNTPLLPVKKPGTNDYRPVQDLREVNKRVEDIHPTVPNPYNLLSGLPPSHQWYTVLDLKDAFFCLRLHPTSQPLFAFEWRDPEMGISGQLTWTRLPQGFKNSPTLFDEALHRDLADFRIQHPDLILLQYVDDLLLAATSELDCQQGTRALLQTLGNLGYRASAKKAQICQKQVKYLGYLLKEGQRWLTEARKETVMGQPTPKTPRQLREFLGTAGFCRLWIPGFAEMAAPLYPLTKTGTLFNWGPDQQKAYQEIKQALLTAPALGLPDLTKPFELFVDEKQGYAKGVLTQKLGPWRRPVAYLSKKLDPVAAGWPPCLRMVAAIAVLTKDAGKLTMGQPLVILAPHAVEALVKQPPDRWLSNARMTHYQALLLDTDRVQFGPVVALNPATLLPLPEEGLQHNCLDILAEAHGTRPDLTDQPLPDADHTWYTDGSSLLQEGQRKAGAAVTTETEVIWAKALPAGTSAQRAELIALTQALKMAEGKKLNVYTDSRYAFATAHIHGEIYRRRGLLTSEGKEIKNKDEILALLKALFLPKRLSIIHCPGHQKGHSAEARGNRMADQAARKAAITETPDTSTLLIENSSP

SEQ ID NO: 1864 - protein, 677 aa, synthetic construct
TLNIEDEYRLHETSKEPDVSLGSTWLSDFPQAWAETGGMGLAVRQAPLIIPLKATSTPVSIKQYPMSQEARLGIKPHIQRLLDQGILVPCQSPWNTPLLPVKKPGTNDYRPVQDLREVNKRVEDIHPTVPNPYNLLSGLPPSHQWYTVLDLKDAFFCLRLHPTSQPLFAFEWRDPEMGISGQLTWTRLPQGFKNSPTLFNEALHRDLADFRIQHPDLILLQYVDDLLLAATSELDCQQGTRALLQTLGNLGYRASAKKAQICQKQVKYLGYLLKEGQRWLTEARKETVMGQPTPKTPRQLREFLGKAGFCRLFIPGFAEMAAPLYPLTKPGTLFNWGPDQQKAYQEIKQALLTAPALGLPDLTKPFELFVDEKQGYAKGVLTQKLGPWRRPVAYLSKKLDPVAAGWPPCLRMVAAIAVLTKDAGKLTMGQPLVILAPHAVEALVKQPPDRWLSNARMTHYQALLLDTDRVQFGPVVALNPATLLPLPEEGLQHNCLDILAEAHGTRPDLTDQPLPDADHTWYTDGSSLLQEGQRKAGAAVTTETEVIWAKALPAGTSAQRAELIALTQALKMAEGKKLNVYTDSRYAFATAHIHGEIYRRRGWLTSEGKEIKNKDEILALLKALFLPKRLSIIHCPGHQKGHSAEARGNRMADQAARKAAITETPDTSTLLIENSSP

SEQ ID NO: 1865 - protein, 1368 aa, Streptococcus pyogenes [sequence omitted]

SEQ ID NO: 1866 - protein, 1368 aa, synthetic construct
MDKKYSIGLDIGTNSVGWAVITDEYKVPSKKFKVLGNTDRHSIKKNLIGALLFDSGETAEATRLKRTARRRYTRRKNRICYLQEIFSNEMAKVDDSFFHRLEESFLVEEDKKHERHPIFGNIVDEVAYHEKYPTIYHLRKKLVDSTDKADLRLIYLALAHMIKFRGHFLIEGDLNPDNSDVDKLFIQLVQTYNQLFEENPINASGVDAKAILSARLSKSRRLENLIAQLPGEKKNGLFGNLIALSLGLTPNFKSNFDLAEDAKLQLSKDTYDDDLDNLLAQIGDQYADLFLAAKNLSDAILLSDILRVNTEITKAPLSASMIKRYDEHHQDLTLLKALVRQQLPEKYKEIFFDQSKNGYAGYIDGGASQEEFYKFIKPILEKMDGTEELLVKLNREDLLRKQRTFDNGSIPHQIHLGELHAILRRQEDFYPFLKDNREKIEKILTFRIPYYVGPLARGNSRFAWMTRKSEETITPWNFEEVVDKGASAQSFIERMTNFDKNLPNEKVLPKHSLLYEYFTVYNELTKVKYVTEGMRKPAFLSGEQKKAIVDLLFKTNRKVTVKQLKEDYFKKIECFDSVEISGVEDRFNASLGTYHDLLKIIKDKDFLDNEENEDILEDIVLTLTLFEDREMIEERLKTYAHLFDDKVMKQLKRRRYTGWGRLSRKLINGIRDKQSGKTILDFLKSDGFANRNFMQLIHDDSLTFKEDIQKAQVSGQGDSLHEHIANLAGSPAIKKGILQTVKVVDELVKVMGRHKPENIVIEMARENQTTQKGQKNSRERMKRIEEGIKELGSQILKEHPVENTQLQNEKLYLYYLQNGRDMYVDQELDINRLSDYDVDAIVPQSFLKDDSIDNKVLTRSDKNRGKSDNVPSEEVVKKMKNYWRQLLNAKLITQRKFDNLTKAERGGLSELDKAGFIKRQLVETRQITKHVAQILDSRMNTKYDENDKLIREVKVITLKSKLVSDFRKDFQFYKVREINNYHHAHDAYLNAVVGTALIKKYPKLESEFVYGDYKVYDVRKMIAKSEQEIGKATAKYFFYSNIMNFFKTEITLANGEIRKRPLIETNGETGEIVWDKGRDFATVRKVLSMPQVNIVKKTEVQTGGFSKESILPKRNSDKLIARKKDWDPKKYGGFDSPTVAYSVLVVAKVEKGKSKKLKSVKELLGITIMERSSFEKNPIDFLEAKGYKEVKKDLIIKLPKYSLFELENGRKRMLASAGELQKGNELALPSKYVNFLYLASHYEKLKGSPEDNEQKQLFVEQHKHYLDEIIEQISEFSKRVILADANLDKVLSAYNKHRDKPIREQAENIIHLFTLTNLGAPAAFKYFDTTIDRKRYTSTKEVLDATLIHQSITGLYETRIDLSQLGGD

SEQ ID NO: 1867 - protein, 1367 aa, synthetic construct
DKKYSIGLDIGTNSVGWAVITDEYKVPSKKFKVLGNTDRHSIKKNLIGALLFDSGETAEATRLKRTARRRYTRRKNRICYLQEIFSNEMAKVDDSFFHRLEESFLVEEDKKHERHPIFGNIVDEVAYHEKYPTIYHLRKKLVDSTDKADLRLIYLALAHMIKFRGHFLIEGDLNPDNSDVDKLFIQLVQTYNQLFEENPINASGVDAKAILSARLSKSRRLENLIAQLPGEKKNGLFGNLIALSLGLTPNFKSNFDLAEDAKLQLSKDTYDDDLDNLLAQIGDQYADLFLAAKNLSDAILLSDILRVNTEITKAPLSASMIKRYDEHHQDLTLLKALVRQQLPEKYKEIFFDQSKNGYAGYIDGGASQEEFYKFIKPILEKMDGTEELLVKLNREDLLRKQRTFDNGSIPHQIHLGELHAILRRQEDFYPFLKDNREKIEKILTFRIPYYVGPLARGNSRFAWMTRKSEETITPWNFEEVVDKGASAQSFIERMTNFDKNLPNEKVLPKHSLLYEYFTVYNELTKVKYVTEGMRKPAFLSGEQKKAIVDLLFKTNRKVTVKQLKEDYFKKIECFDSVEISGVEDRFNASLGTYHDLLKIIKDKDFLDNEENEDILEDIVLTLTLFEDREMIEERLKTYAHLFDDKVMKQLKRRRYTGWGRLSRKLINGIRDKQSGKTILDFLKSDGFANRNFMQLIHDDSLTFKEDIQKAQVSGQGDSLHEHIANLAGSPAIKKGILQTVKVVDELVKVMGRHKPENIVIEMARENQTTQKGQKNSRERMKRIEEGIKELGSQILKEHPVENTQLQNEKLYLYYLQNGRDMYVDQELDINRLSDYDVDAIVPQSFLKDDSIDNKVLTRSDKNRGKSDNVPSEEVVKKMKNYWRQLLNAKLITQRKFDNLTKAERGGLSELDKAGFIKRQLVETRQITKHVAQILDSRMNTKYDENDKLIREVKVITLKSKLVSDFRKDFQFYKVREINNYHHAHDAYLNAVVGTALIKKYPKLESEFVYGDYKVYDVRKMIAKSEQEIGKATAKYFFYSNIMNFFKTEITLANGEIRKRPLIETNGETGEIVWDKGRDFATVRKVLSMPQVNIVKKTEVQTGGFSKESILPKRNSDKLIARKKDWDPKKYGGFDSPTVAYSVLVVAKVEKGKSKKLKSVKELLGITIMERSSFEKNPIDFLEAKGYKEVKKDLIIKLPKYSLFELENGRKRMLASAGELQKGNELALPSKYVNFLYLASHYEKLKGSPEDNEQKQLFVEQHKHYLDEIIEQISEFSKRVILADANLDKVLSAYNKHRDKPIREQAENIIHLFTLTNLGAPAAFKYFDTTIDRKRYTSTKEVLDATLIHQSITGLYETRIDLSQLGGD

SEQ ID NO: 1868 - protein, 1367 aa, synthetic construct
DKKYSIGLDIGTNSVGWAVITDEYKVPSKKFKVLGNTDRHSIKKNLIGALLFDSGETAEATRLKRTARRRYTRRKNRICYLQEIFSNEMAKVDDSFFHRLEESFLVEEDKKHERHPIFGNIVDEVAYHEKYPTIYHLRKKLVDSTDKADLRLIYLALAHMIKFRGHFLIEGDLNPDNSDVDKLFIQLVQTYNQLFEENPINASGVDAKAILSARLSKSRKLENLIAQLPGEKKNGLFGNLIALSLGLTPNFKSNFDLAEDAKLQLSKDTYDDDLDNLLAQIGDQYADLFLAAKNLSDAILLSDILRVNTEITKAPLSASMIKRYDEHHQDLTLLKALVRQQLPEKYKEIFFDQSKNGYAGYIDGGASQEEFYKFIKPILEKMDGTEELLVKLKREDLLRKQRTFDNGSIPHQIHLGELHAILRRQEDFYPFLKDNREKIEKILTFRIPYYVGPLARGNSRFAWMTRKSEETITPWNFEEVVDKGASAQSFIERMTNFDKNLPNEKVLPKHSLLYEYFTVYNELTKVKYVTEGMRKPAFLSGEQKKAIVDLLFKTNRKVTVKQLKEDYFKKIECFDSVEISGVEDRFNASLGTYHDLLKIIKDKDFLDNEENEDILEDIVLTLTLFEDREMIEERLKTYAHLFDDKVMKQLKRRRYTGWGRLSRKLINGIRDKQSGKTILDFLKSDGFANRNFMQLIHDDSLTFKEDIQKAQVSGQGDSLHEHIANLAGSPAIKKGILQTVKVVDELVKVMGRHKPENIVIEMARENQTTQKGQKNSRERMKRIEEGIKELGSQILKEHPVENTQLQNEKLYLYYLQNGRDMYVDQELDINRLSDYDVDAIVPQSFLKDDSIDNKVLTRSDKNRGKSDNVPSEEVVKKMKNYWRQLLNAKLITQRKFDNLTKAERGGLSELDKAGFIKRQLVETRQITKHVAQILDSRMNTKYDENDKLIREVKVITLKSKLVSDFRKDFQFYKVREINNYHHAHDAYLNAVVGTALIKKYPKLESEFVYGDYKVYDVRKMIAKSEQEIGKATAKYFFYSNIMNFFKTEITLANGEIRKRPLIETNGETGEIVWDKGRDFATVRKVLSMPQVNIVKKTEVQTGGFSKESILPKRNSDKLIARKKDWDPKKYGGFDSPTVAYSVLVVAKVEKGKSKKLKSVKELLGITIMERSSFEKNPIDFLEAKGYKEVKKDLIIKLPKYSLFELENGRKRMLASAGELQKGNELALPSKYVNFLYLASHYEKLKGSPEDNEQKQLFVEQHKHYLDEIIEQISEFSKRVILADANLDKVLSAYNKHRDKPIREQAENIIHLFTLTNLGAPAAFKYFDTTIDRKRYTSTKEVLDATLIHQSITGLYETRIDLSQLGGD

SEQ ID NO: 1869 - protein, 1054 aa, Staphylococcus lugdunensis
MNQKFILGLDIGITSVGYGLIDYETKNIIDAGVRLFPEANVENNEGRRSKRGSRRLKRRRIHRLERVKKLLEDYNLLDQSQIPQSTNPYAIRVKGLSEALSKDELVIALLHIAKRRGIHKIDVIDSNDDVGNELSTKEQLNKNSKLLKDKFVCQIQLERMNEGQVRGEKNRFKTADIIKEIIQLLNVQKNFHQLDENFINKYIELVEMRREYFEGPGKGSPYGWEGDPKAWYETLMGHCTYFPDELRSVKYAYSADLFNALNDLNNLVIQRDGLSKLEYHEKYHIIENVFKQKKKPTLKQIANEINVNPEDIKGYRITKSGKPQFTEFKLYHDLKSVLFDQSILENEDVLDQIAEILTIYQDKDSIKSKLTELDILLNEEDKENIAQLTGYTGTHRLSLKCIRLVLEEQWYSSRNQMEIFTHLNIKPKKINLTAANKIPKAMIDEFILSPVVKRTFGQAINLINKIIEKYGVPEDIIIELARENNSKDKQKFINEMQKKNENTRKRINEIIGKYGNQNAKRLVEKIRLHDEQEGKCLYSLESIPLEDLLNNPNHYEVDHIIPRSVSFDNSYHNKVLVKQSENSKKSNLTPYQYFNSGKSKLSYNQFKQHILNLSKSQDRISKKKKEYLLEERDINKFEVQKEFINRNLVDTRYATRELTNYLKAYFSANNMNVKVKTINGSFTDYLRKVWKFKKERNHGYKHHAEDALIIANADFLFKENKKLKAVNSVLEKPEIESKQLDIQVDSEDNYSEMFIIPKQVQDIKDFRNFKYSHRVDKKPNRQLINDTLYSTRKKDNSTYIVQTIKDIYAKDNTTLKKQFDKSPEKFLMYQHDPRTFEKLEVIMKQYANEKNPLAKYHEETGEYLTKYSKKNNGPIVKSLKYIGNKLGSHLDVTHQFKSSTKKLVKLSIKPYRFDVYLTDKGYKFITISYLDVLKKDNYYYIPEQKYDKLKLGKAIDKNAKFIASFYKNDLIKLDGEIYKIIGVNSDTRNMIELDLPDIRYKEYCELNNIKGEPRIKKTIGKKVNSIEKLTTDVLGNVFTNTQYTKPQLLFKRGN

SEQ ID NO: 1870 - protein, 1054 aa, synthetic construct
MNQKFILGLDIGITSVGYGLIDYETKNIIDAGVRLFPEANVENNEGRRSKRGSRRLKRRRIHRLERVKKLLEDYNLLDQSQIPQSTNPYAIRVKGLSEALSKDELVIALLHIAKRRGIHKIDVIDSNDDVGNELSTKEQLNKNSKLLKDKFVCQIQLERMNEGQVRGEKNRFKTADIIKEIIQLLNVQKNFHQLDENFINKYIELVEMRREYFEGPGKGSPYGWEGDPKAWYETLMGHCTYFPDELRSVKYAYSADLFNALNDLNNLVIQRDGLSKLEYHEKYHIIENVFKQKKKPTLKQIANEINVNPEDIKGYRITKSGKPQFTEFKLYHDLKSVLFDQSILENEDVLDQIAEILTIYQDKDSIKSKLTELDILLNEEDKENIAQLTGYTGTHRLSLKCIRLVLEEQWYSSRNQMEIFTHLNIKPKKINLTAANKIPKAMIDEFILSPVVKRTFGQAINLINKIIEKYGVPEDIIIELARENNSKDKQKFINEMQKKNENTRKRINEIIGKYGNQNAKRLVEKIRLHDEQEGKCLYSLESIPLEDLLNNPNHYEVDHIIPRSVSFDNSYHNKVLVKQSEASKKSNLTPYQYFNSGKSKLSYNQFKQHILNLSKSQDRISKKKKEYLLEERDINKFEVQKEFINRNLVDTRYATRELTNYLKAYFSANNMNVKVKTINGSFTDYLRKVWKFKKERNHGYKHHAEDALIIANADFLFKENKKLKAVNSVLEKPEIESKQLDIQVDSEDNYSEMFIIPKQVQDIKDFRNFKYSHRVDKKPNRQLINDTLYSTRKKDNSTYIVQTIKDIYAKDNTTLKKQFDKSPEKFLMYQHDPRTFEKLEVIMKQYANEKNPLAKYHEETGEYLTKYSKKNNGPIVKSLKYIGNKLGSHLDVTHQFKSSTKKLVKLSIKPYRFDVYLTDKGYKFITISYLDVLKKDNYYYIPEQKYDKLKLGKAIDKNAKFIASFYKNDLIKLDGEIYKIIGVNSDTRNMIELDLPDIRYKEYCELNNIKGEPRIKKTIGKKVNSIEKLTTDVLGNVFTNTQYTKPQLLFKRGN

SEQ ID NO: 1871 - protein, 1053 aa, synthetic construct
NQKFILGLDIGITSVGYGLIDYETKNIIDAGVRLFPEANVENNEGRRSKRGSRRLKRRRIHRLERVKKLLEDYNLLDQSQIPQSTNPYAIRVKGLSEALSKDELVIALLHIAKRRGIHKIDVIDSNDDVGNELSTKEQLNKNSKLLKDKFVCQIQLERMNEGQVRGEKNRFKTADIIKEIIQLLNVQKNFHQLDENFINKYIELVEMRREYFEGPGKGSPYGWEGDPKAWYETLMGHCTYFPDELRSVKYAYSADLFNALNDLNNLVIQRDGLSKLEYHEKYHIIENVFKQKKKPTLKQIANEINVNPEDIKGYRITKSGKPQFTEFKLYHDLKSVLFDQSILENEDVLDQIAEILTIYQDKDSIKSKLTELDILLNEEDKENIAQLTGYTGTHRLSLKCIRLVLEEQWYSSRNQMEIFTHLNIKPKKINLTAANKIPKAMIDEFILSPVVKRTFGQAINLINKIIEKYGVPEDIIIELARENNSKDKQKFINEMQKKNENTRKRINEIIGKYGNQNAKRLVEKIRLHDEQEGKCLYSLESIPLEDLLNNPNHYEVDHIIPRSVSFDNSYHNKVLVKQSEASKKSNLTPYQYFNSGKSKLSYNQFKQHILNLSKSQDRISKKKKEYLLEERDINKFEVQKEFINRNLVDTRYATRELTNYLKAYFSANNMNVKVKTINGSFTDYLRKVWKFKKERNHGYKHHAEDALIIANADFLFKENKKLKAVNSVLEKPEIESKQLDIQVDSEDNYSEMFIIPKQVQDIKDFRNFKYSHRVDKKPNRQLINDTLYSTRKKDNSTYIVQTIKDIYAKDNTTLKKQFDKSPEKFLMYQHDPRTFEKLEVIMKQYANEKNPLAKYHEETGEYLTKYSKKNNGPIVKSLKYIGNKLGSHLDVTHQFKSSTKKLVKLSIKPYRFDVYLTDKGYKFITISYLDVLKKDNYYYIPEQKYDKLKLGKAIDKNAKFIASFYKNDLIKLDGEIYKIIGVNSDTRNMIELDLPDIRYKEYCELNNIKGEPRIKKTIGKKVNSIEKLTTDVLGNVFTNTQYTKPQLLFKRGN

SEQ ID NO: 1872 - protein, 1053 aa, Staphylococcus aureus
MKRNYILGLDIGITSVGYGIIDYETRDVIDAGVRLFKEANVENNEGRRSKRGARRLKRRRRHRIQRVKKLLFDYNLLTDHSELSGINPYEARVKGLSQKLSEEEFSAALLHLAKRRGVHNVNEVEEDTGNELSTKEQISRNSKALEEKYVAELQLERLKKDGEVRGSINRFKTSDYVKEAKQLLKVQKAYHQLDQSFIDTYIDLLETRRTYYEGPGEGSPFGWKDIKEWYEMLMGHCTYFPEELRSVKYAYNADLYNALNDLNNLVITRDENEKLEYYEKFQIIENVFKQKKKPTLKQIAKEILVNEEDIKGYRVTSTGKPEFTNLKVYHDIKDITARKEIIENAELLDQIAKILTIYQSSEDIQEELTNLNSELTQEEIEQISNLKGYTGTHNLSLKAINLILDELWHTNDNQIAIFNRLKLVPKKVDLSQQKEIPTTLVDDFILSPVVKRSFIQSIKVINAIIKKYGLPNDIIIELAREKNSKDAQKMINEMQKRNRQTNERIEEIIRTTGKENAKYLIEKIKLHDMQEGKCLYSLEAIPLEDLLNNPFNYEVDHIIPRSVSFDNSFNNKVLVKQEENSKKGNRTPFQYLSSSDSKISYETFKKHILNLAKGKGRISKTKKEYLLEERDINRFSVQKDFINRNLVDTRYATRGLMNLLRSYFRVNNLDVKVKSINGGFTSFLRRKWKFKKERNKGYKHHAEDALIIANADFIFKEWKKLDKAKKVMENQMFEEKQAESMPEIETEQEYKEIFITPHQIKHIKDFKDYKYSHRVDKKPNRELINDTLYSTRKDDKGNTLIVNNLNGLYDKDNDKLKKLINKSPEKLLMYHHDPQTYQKLKLIMEQYGDEKNPLYKYYEETGNYLTKYSKKDNGPVIKKIKYYGNKLNAHLDITDDYPNSRNKVVKLSLKPYRFDVYLDNGVYKFVTVKNLDVIKKENYYEVNSKCYEEAKKLKKISNQAEFIASFYNNDLIKINGELYRVIGVNNDLLNRIEVNMIDITYREYLENMNDKRPPRIIKTIASKTQSIKKYSTDILGNLYEVKSKKHPQIIKKG

SEQ ID NO: 1873 - protein, 1053 aa, synthetic construct
MKRNYILGLDIGITSVGYGIIDYETRDVIDAGVRLFKEANVENNEGRRSKRGARRLKRRRRHRIQRVKKLLFDYNLLTDHSELSGINPYEARVKGLSQKLSEEEFSAALLHLAKRRGVHNVNEVEEDTGNELSTKEQISRNSKALEEKYVAELQLERLKKDGEVRGSINRFKTSDYVKEAKQLLKVQKAYHQLDQSFIDTYIDLLETRRTYYEGPGEGSPFGWKDIKEWYEMLMGHCTYFPEELRSVKYAYNADLYNALNDLNNLVITRDENEKLEYYEKFQIIENVFKQKKKPTLKQIAKEILVNEEDIKGYRVTSTGKPEFTNLKVYHDIKDITARKEIIENAELLDQIAKILTIYQSSEDIQEELTNLNSELTQEEIEQISNLKGYTGTHNLSLKAINLILDELWHTNDNQIAIFNRLKLVPKKVDLSQQKEIPTTLVDDFILSPVVKRSFIQSIKVINAIIKKYGLPNDIIIELAREKNSKDAQKMINEMQKRNRQTNERIEEIIRTTGKENAKYLIEKIKLHDMQEGKCLYSLEAIPLEDLLNNPFNYEVDHIIPRSVSFDNSFNNKVLVKQEEASKKGNRTPFQYLSSSDSKISYETFKKHILNLAKGKGRISKTKKEYLLEERDINRFSVQKDFINRNLVDTRYATRGLMNLLRSYFRVNNLDVKVKSINGGFTSFLRRKWKFKKERNKGYKHHAEDALIIANADFIFKEWKKLDKAKKVMENQMFEEKQAESMPEIETEQEYKEIFITPHQIKHIKDFKDYKYSHRVDKKPNRELINDTLYSTRKDDKGNTLIVNNLNGLYDKDNDKLKKLINKSPEKLLMYHHDPQTYQKLKLIMEQYGDEKNPLYKYYEETGNYLTKYSKKDNGPVIKKIKYYGNKLNAHLDITDDYPNSRNKVVKLSLKPYRFDVYLDNGVYKFVTVKNLDVIKKENYYEVNSKCYEEAKKLKKISNQAEFIASFYNNDLIKINGELYRVIGVNNDLLNRIEVNMIDITYREYLENMNDKRPPRIIKTIASKTQSIKKYSTDILGNLYEVKSKKHPQIIKKG

SEQ ID NO: 1874 - protein, 1052 aa, synthetic construct
KRNYILGLDIGITSVGYGIIDYETRDVIDAGVRLFKEANVENNEGRRSKRGARRLKRRRRHRIQRVKKLLFDYNLLTDHSELSGINPYEARVKGLSQKLSEEEFSAALLHLAKRRGVHNVNEVEEDTGNELSTKEQISRNSKALEEKYVAELQLERLKKDGEVRGSINRFKTSDYVKEAKQLLKVQKAYHQLDQSFIDTYIDLLETRRTYYEGPGEGSPFGWKDIKEWYEMLMGHCTYFPEELRSVKYAYNADLYNALNDLNNLVITRDENEKLEYYEKFQIIENVFKQKKKPTLKQIAKEILVNEEDIKGYRVTSTGKPEFTNLKVYHDIKDITARKEIIENAELLDQIAKILTIYQSSEDIQEELTNLNSELTQEEIEQISNLKGYTGTHNLSLKAINLILDELWHTNDNQIAIFNRLKLVPKKVDLSQQKEIPTTLVDDFILSPVVKRSFIQSIKVINAIIKKYGLPNDIIIELAREKNSKDAQKMINEMQKRNRQTNERIEEIIRTTGKENAKYLIEKIKLHDMQEGKCLYSLEAIPLEDLLNNPFNYEVDHIIPRSVSFDNSFNNKVLVKQEEASKKGNRTPFQYLSSSDSKISYETFKKHILNLAKGKGRISKTKKEYLLEERDINRFSVQKDFINRNLVDTRYATRGLMNLLRSYFRVNNLDVKVKSINGGFTSFLRRKWKFKKERNKGYKHHAEDALIIANADFIFKEWKKLDKAKKVMENQMFEEKQAESMPEIETEQEYKEIFITPHQIKHIKDFKDYKYSHRVDKKPNRELINDTLYSTRKDDKGNTLIVNNLNGLYDKDNDKLKKLINKSPEKLLMYHHDPQTYQKLKLIMEQYGDEKNPLYKYYEETGNYLTKYSKKDNGPVIKKIKYYGNKLNAHLDITDDYPNSRNKVVKLSLKPYRFDVYLDNGVYKFVTVKNLDVIKKENYYEVNSKCYEEAKKLKKISNQAEFIASFYNNDLIKINGELYRVIGVNNDLLNRIEVNMIDITYREYLENMNDKRPPRIIKTIASKTQSIKKYSTDILGNLYEVKSKKHPQIIKKG

SEQ ID NO: 1875 - protein, 1368 aa, synthetic construct
MDKKYSIGLDIGTNSVGWAVITDEYKVPSKKFKVLGNTDRHSIKKNLIGALLFDSGETAEATRLKRTARRRYTRRKNRICYLQEIFSNEMAKVDDSFFHRLEESFLVEEDKKHERHPIFGNIVDEVAYHEKYPTIYHLRKKLVDSTDKADLRLIYLALAHMIKFRGHFLIEGDLNPDNSDVDKLFIQLVQTYNQLFEENPINASGVDAKAILSARLSKSRRLENLIAQLPGEKKNGLFGNLIALSLGLTPNFKSNFDLAEDAKLQLSKDTYDDDLDNLLAQIGDQYADLFLAAKNLSDAILLSDILRVNTEITKAPLSASMIKRYDEHHQDLTLLKALVRQQLPEKYKEIFFDQSKNGYAGYIDGGASQEEFYKFIKPILEKMDGTEELLVKLNREDLLRKQRTFDNGSIPHQIHLGELHAILRRQEDFYPFLKDNREKIEKILTFRIPYYVGPLARGNSRFAWMTRKSEETITPWNFEEVVDKGASAQSFIERMTNFDKNLPNEKVLPKHSLLYEYFTVYNELTKVKYVTEGMRKPAFLSGEQKKAIVDLLFKTNRKVTVKQLKEDYFKKIECFDSVEISGVEDRFNASLGTYHDLLKIIKDKDFLDNEENEDILEDIVLTLTLFEDREMIEERLKTYAHLFDDKVMKQLKRRRYTGWGRLSRKLINGIRDKQSGKTILDFLKSDGFANRNFMQLIHDDSLTFKEDIQKAQVSGQGDSLHEHIANLAGSPAIKKGILQTVKVVDELVKVMGRHKPENIVIEMARENQTTQKGQKNSRERMKRIEEGIKELGSQILKEHPVENTQLQNEKLYLYYLQNGRDMYVDQELDINRLSDYDVDHIVPQSFLKDDSIDNKVLTRSDKNRGKSDNVPSEEVVKKMKNYWRQLLNAKLITQRKFDNLTKAERGGLSELDKAGFIKRQLVETRQITKHVAQILDSRMNTKYDENDKLIREVKVITLKSKLVSDFRKDFQFYKVREINNYHHAHDAYLNAVVGTALIKKYPKLESEFVYGDYKVYDVRKMIAKSEQEIGKATAKYFFYSNIMNFFKTEITLANGEIRKRPLIETNGETGEIVWDKGRDFATVRKVLSMPQVNIVKKTEVQTGGFSKESIRPKRNSDKLIARKKDWDPKKYGGFVSPTVAYSVLVVAKVEKGKSKKLKSVKELLGITIMERSSFEKNPIDFLEAKGYKEVKKDLIIKLPKYSLFELENGRKRMLASARFLQKGNELALPSKYVNFLYLASHYEKLKGSPEDNEQKQLFVEQHKHYLDEIIEQISEFSKRVILADANLDKVLSAYNKHRDKPIREQAENIIHLFTLTNLGAPRAFKYFDTTIDRKVYRSTKEVLDATLIHQSITGLYETRIDLSQLGGD

SEQ ID NO: 1876 - protein, 1368 aa, synthetic construct
MDKKYSIGLDIGTNSVGWAVITDEYKVPSKKFKVLGNTDRHSIKKNLIGALLFDSGETAEATRLKRTARRRYTRRKNRICYLQEIFSNEMAKVDDSFFHRLEESFLVEEDKKHERHPIFGNIVDEVAYHEKYPTIYHLRKKLVDSTDKADLRLIYLALAHMIKFRGHFLIEGDLNPDNSDVDKLFIQLVQTYNQLFEENPINASGVDAKAILSARLSKSRRLENLIAQLPGEKKNGLFGNLIALSLGLTPNFKSNFDLAEDAKLQLSKDTYDDDLDNLLAQIGDQYADLFLAAKNLSDAILLSDILRVNTEITKAPLSASMIKRYDEHHQDLTLLKALVRQQLPEKYKEIFFDQSKNGYAGYIDGGASQEEFYKFIKPILEKMDGTEELLVKLNREDLLRKQRTFDNGSIPHQIHLGELHAILRRQEDFYPFLKDNREKIEKILTFRIPYYVGPLARGNSRFAWMTRKSEETITPWNFEEVVDKGASAQSFIERMTNFDKNLPNEKVLPKHSLLYEYFTVYNELTKVKYVTEGMRKPAFLSGEQKKAIVDLLFKTNRKVTVKQLKEDYFKKIECFDSVEISGVEDRFNASLGTYHDLLKIIKDKDFLDNEENEDILEDIVLTLTLFEDREMIEERLKTYAHLFDDKVMKQLKRRRYTGWGRLSRKLINGIRDKQSGKTILDFLKSDGFANRNFMQLIHDDSLTFKEDIQKAQVSGQGDSLHEHIANLAGSPAIKKGILQTVKVVDELVKVMGRHKPENIVIEMARENQTTQKGQKNSRERMKRIEEGIKELGSQILKEHPVENTQLQNEKLYLYYLQNGRDMYVDQELDINRLSDYDVDAIVPQSFLKDDSIDNKVLTRSDKNRGKSDNVPSEEVVKKMKNYWRQLLNAKLITQRKFDNLTKAERGGLSELDKAGFIKRQLVETRQITKHVAQILDSRMNTKYDENDKLIREVKVITLKSKLVSDFRKDFQFYKVREINNYHHAHDAYLNAVVGTALIKKYPKLESEFVYGDYKVYDVRKMIAKSEQEIGKATAKYFFYSNIMNFFKTEITLANGEIRKRPLIETNGETGEIVWDKGRDFATVRKVLSMPQVNIVKKTEVQTGGFSKESIRPKRNSDKLIARKKDWDPKKYGGFVSPTVAYSVLVVAKVEKGKSKKLKSVKELLGITIMERSSFEKNPIDFLEAKGYKEVKKDLIIKLPKYSLFELENGRKRMLASARFLQKGNELALPSKYVNFLYLASHYEKLKGSPEDNEQKQLFVEQHKHYLDEIIEQISEFSKRVILADANLDKVLSAYNKHRDKPIREQAENIIHLFTLTNLGAPRAFKYFDTTIDRKVYRSTKEVLDATLIHQSITGLYETRIDLSQLGGD

SEQ ID NO: 1877 - protein, 1367 aa, synthetic construct
DKKYSIGLDIGTNSVGWAVITDEYKVPSKKFKVLGNTDRHSIKKNLIGALLFDSGETAEATRLKRTARRRYTRRKNRICYLQEIFSNEMAKVDDSFFHRLEESFLVEEDKKHERHPIFGNIVDEVAYHEKYPTIYHLRKKLVDSTDKADLRLIYLALAHMIKFRGHFLIEGDLNPDNSDVDKLFIQLVQTYNQLFEENPINASGVDAKAILSARLSKSRRLENLIAQLPGEKKNGLFGNLIALSLGLTPNFKSNFDLAEDAKLQLSKDTYDDDLDNLLAQIGDQYADLFLAAKNLSDAILLSDILRVNTEITKAPLSASMIKRYDEHHQDLTLLKALVRQQLPEKYKEIFFDQSKNGYAGYIDGGASQEEFYKFIKPILEKMDGTEELLVKLNREDLLRKQRTFDNGSIPHQIHLGELHAILRRQEDFYPFLKDNREKIEKILTFRIPYYVGPLARGNSRFAWMTRKSEETITPWNFEEVVDKGASAQSFIERMTNFDKNLPNEKVLPKHSLLYEYFTVYNELTKVKYVTEGMRKPAFLSGEQKKAIVDLLFKTNRKVTVKQLKEDYFKKIECFDSVEISGVEDRFNASLGTYHDLLKIIKDKDFLDNEENEDILEDIVLTLTLFEDREMIEERLKTYAHLFDDKVMKQLKRRRYTGWGRLSRKLINGIRDKQSGKTILDFLKSDGFANRNFMQLIHDDSLTFKEDIQKAQVSGQGDSLHEHIANLAGSPAIKKGILQTVKVVDELVKVMGRHKPENIVIEMARENQTTQKGQKNSRERMKRIEEGIKELGSQILKEHPVENTQLQNEKLYLYYLQNGRDMYVDQELDINRLSDYDVDAIVPQSFLKDDSIDNKVLTRSDKNRGKSDNVPSEEVVKKMKNYWRQLLNAKLITQRKFDNLTKAERGGLSELDKAGFIKRQLVETRQITKHVAQILDSRMNTKYDENDKLIREVKVITLKSKLVSDFRKDFQFYKVREINNYHHAHDAYLNAVVGTALIKKYPKLESEFVYGDYKVYDVRKMIAKSEQEIGKATAKYFFYSNIMNFFKTEITLANGEIRKRPLIETNGETGEIVWDKGRDFATVRKVLSMPQVNIVKKTEVQTGGFSKESIRPKRNSDKLIARKKDWDPKKYGGFVSPTVAYSVLVVAKVEKGKSKKLKSVKELLGITIMERSSFEKNPIDFLEAKGYKEVKKDLIIKLPKYSLFELENGRKRMLASARFLQKGNELALPSKYVNFLYLASHYEKLKGSPEDNEQKQLFVEQHKHYLDEIIEQISEFSKRVILADANLDKVLSAYNKHRDKPIREQAENIIHLFTLTNLGAPRAFKYFDTTIDRKVYRSTKEVLDATLIHQSITGLYETRIDLSQLGGD

SEQ ID NO: 1878 - protein, 1368 aa, synthetic construct
MDKKYSIGLDIGTNSVGWAVITDEYKVPSKKFKVLGNTDRHSIKKNLIGALLFDSGETAEATRLKRTARRRYTRRKNRICYLQEIFSNEMAKVDDSFFHRLEESFLVEEDKKHERHPIFGNIVDEVAYHEKYPTIYHLRKKLVDSTDKADLRLIYLALAHMIKFRGHFLIEGDLNPDNSDVDKLFIQLVQTYNQLFEENPINASGVDAKAILSARLSKSRRLENLIAQLPGEKKNGLFGNLIALSLGLTPNFKSNFDLAEDAKLQLSKDTYDDDLDNLLAQIGDQYADLFLAAKNLSDAILLSDILRVNTEITKAPLSASMIKRYDEHHQDLTLLKALVRQQLPEKYKEIFFDQSKNGYAGYIDGGASQEEFYKFIKPILEKMDGTEELLVKLNREDLLRKQRTFDNGSIPHQIHLGELHAILRRQEDFYPFLKDNREKIEKILTFRIPYYVGPLARGNSRFAWMTRKSEETITPWNFEEVVDKGASAQSFIERMTNFDKNLPNEKVLPKHSLLYEYFTVYNELTKVKYVTEGMRKPAFLSGEQKKAIVDLLFKTNRKVTVKQLKEDYFKKIECFDSVEISGVEDRFNASLGTYHDLLKIIKDKDFLDNEENEDILEDIVLTLTLFEDREMIEERLKTYAHLFDDKVMKQLKRRRYTGWGRLSRKLINGIRDKQSGKTILDFLKSDGFANRNFMQLIHDDSLTFKEDIQKAQVSGQGDSLHEHIANLAGSPAIKKGILQTVKVVDELVKVMGRHKPENIVIEMARENQTTQKGQKNSRERMKRIEEGIKELGSQILKEHPVENTQLQNEKLYLYYLQNGRDMYVDQELDINRLSDYDVDHIVPQSFLKDDSIDNKVLTRSDKNRGKSDNVPSEEVVKKMKNYWRQLLNAKLITQRKFDNLTKAERGGLSELDKAGFIKRQLVETRQITKHVAQILDSRMNTKYDENDKLIREVKVITLKSKLVSDFRKDFQFYKVREINNYHHAHDAYLNAVVGTALIKKYPKLESEFVYGDYKVYDVRKMIAKSEQEIGKATAKYFFYSNIMNFFKTEITLANGEIRKRPLIETNGETGEIVWDKGRDFATVRKVLSMPQVNIVKKTEVQTGGFSKESILPKRNSDKLIARKKDWDPKKYGGFVSPTVAYSVLVVAKVEKGKSKKLKSVKELLGITIMERSSFEKNPIDFLEAKGYKEVKKDLIIKLPKYSLFELENGRKRMLASARELQKGNELALPSKYVNFLYLASHYEKLKGSPEDNEQKQLFVEQHKHYLDEIIEQISEFSKRVILADANLDKVLSAYNKHRDKPIREQAENIIHLFTLTNLGAPAAFKYFDTTIDRKQYRSTKEVLDATLIHQSITGLYETRIDLSQLGGD

SEQ ID NO: 1879 - protein, 1368 aa, synthetic construct
MDKKYSIGLDIGTNSVGWAVITDEYKVPSKKFKVLGNTDRHSIKKNLIGALLFDSGETAEATRLKRTARRRYTRRKNRICYLQEIFSNEMAKVDDSFFHRLEESFLVEEDKKHERHPIFGNIVDEVAYHEKYPTIYHLRKKLVDSTDKADLRLIYLALAHMIKFRGHFLIEGDLNPDNSDVDKLFIQLVQTYNQLFEENPINASGVDAKAILSARLSKSRRLENLIAQLPGEKKNGLFGNLIALSLGLTPNFKSNFDLAEDAKLQLSKDTYDDDLDNLLAQIGDQYADLFLAAKNLSDAILLSDILRVNTEITKAPLSASMIKRYDEHHQDLTLLKALVRQQLPEKYKEIFFDQSKNGYAGYIDGGASQEEFYKFIKPILEKMDGTEELLVKLNREDLLRKQRTFDNGSIPHQIHLGELHAILRRQEDFYPFLKDNREKIEKILTFRIPYYVGPLARGNSRFAWMTRKSEETITPWNFEEVVDKGASAQSFIERMTNFDKNLPNEKVLPKHSLLYEYFTVYNELTKVKYVTEGMRKPAFLSGEQKKAIVDLLFKTNRKVTVKQLKEDYFKKIECFDSVEISGVEDRFNASLGTYHDLLKIIKDKDFLDNEENEDILEDIVLTLTLFEDREMIEERLKTYAHLFDDKVMKQLKRRRYTGWGRLSRKLINGIRDKQSGKTILDFLKSDGFANRNFMQLIHDDSLTFKEDIQKAQVSGQGDSLHEHIANLAGSPAIKKGILQTVKVVDELVKVMGRHKPENIVIEMARENQTTQKGQKNSRERMKRIEEGIKELGSQILKEHPVENTQLQNEKLYLYYLQNGRDMYVDQELDINRLSDYDVDAIVPQSFLKDDSIDNKVLTRSDKNRGKSDNVPSEEVVKKMKNYWRQLLNAKLITQRKFDNLTKAERGGLSELDKAGFIKRQLVETRQITKHVAQILDSRMNTKYDENDKLIREVKVITLKSKLVSDFRKDFQFYKVREINNYHHAHDAYLNAVVGTALIKKYPKLESEFVYGDYKVYDVRKMIAKSEQEIGKATAKYFFYSNIMNFFKTEITLANGEIRKRPLIETNGETGEIVWDKGRDFATVRKVLSMPQVNIVKKTEVQTGGFSKESILPKRNSDKLIARKKDWDPKKYGGFVSPTVAYSVLVVAKVEKGKSKKLKSVKELLGITIMERSSFEKNPIDFLEAKGYKEVKKDLIIKLPKYSLFELENGRKRMLASARELQKGNELALPSKYVNFLYLASHYEKLKGSPEDNEQKQLFVEQHKHYLDEIIEQISEFSKRVILADANLDKVLSAYNKHRDKPIREQAENIIHLFTLTNLGAPAAFKYFDTTIDRKQYRSTKEVLDATLIHQSITGLYETRIDLSQLGGD

SEQ ID NO: 1880 - protein, 1367 aa, synthetic construct
DKKYSIGLDIGTNSVGWAVITDEYKVPSKKFKVLGNTDRHSIKKNLIGALLFDSGETAEATRLKRTARRRYTRRKNRICYLQEIFSNEMAKVDDSFFHRLEESFLVEEDKKHERHPIFGNIVDEVAYHEKYPTIYHLRKKLVDSTDKADLRLIYLALAHMIKFRGHFLIEGDLNPDNSDVDKLFIQLVQTYNQLFEENPINASGVDAKAILSARLSKSRRLENLIAQLPGEKKNGLFGNLIALSLGLTPNFKSNFDLAEDAKLQLSKDTYDDDLDNLLAQIGDQYADLFLAAKNLSDAILLSDILRVNTEITKAPLSASMIKRYDEHHQDLTLLKALVRQQLPEKYKEIFFDQSKNGYAGYIDGGASQEEFYKFIKPILEKMDGTEELLVKLNREDLLRKQRTFDNGSIPHQIHLGELHAILRRQEDFYPFLKDNREKIEKILTFRIPYYVGPLARGNSRFAWMTRKSEETITPWNFEEVVDKGASAQSFIERMTNFDKNLPNEKVLPKHSLLYEYFTVYNELTKVKYVTEGMRKPAFLSGEQKKAIVDLLFKTNRKVTVKQLKEDYFKKIECFDSVEISGVEDRFNASLGTYHDLLKIIKDKDFLDNEENEDILEDIVLTLTLFEDREMIEERLKTYAHLFDDKVMKQLKRRRYTGWGRLSRKLINGIRDKQSGKTILDFLKSDGFANRNFMQLIHDDSLTFKEDIQKAQVSGQGDSLHEHIANLAGSPAIKKGILQTVKVVDELVKVMGRHKPENIVIEMARENQTTQKGQKNSRERMKRIEEGIKELGSQILKEHPVENTQLQNEKLYLYYLQNGRDMYVDQELDINRLSDYDVDAIVPQSFLKDDSIDNKVLTRSDKNRGKSDNVPSEEVVKKMKNYWRQLLNAKLITQRKFDNLTKAERGGLSELDKAGFIKRQLVETRQITKHVAQILDSRMNTKYDENDKLIREVKVITLKSKLVSDFRKDFQFYKVREINNYHHAHDAYLNAVVGTALIKKYPKLESEFVYGDYKVYDVRKMIAKSEQEIGKATAKYFFYSNIMNFFKTEITLANGEIRKRPLIETNGETGEIVWDKGRDFATVRKVLSMPQVNIVKKTEVQTGGFSKESILPKRNSDKLIARKKDWDPKKYGGFVSPTVAYSVLVVAKVEKGKSKKLKSVKELLGITIMERSSFEKNPIDFLEAKGYKEVKKDLIIKLPKYSLFELENGRKRMLASARELQKGNELALPSKYVNFLYLASHYEKLKGSPEDNEQKQLFVEQHKHYLDEIIEQISEFSKRVILADANLDKVLSAYNKHRDKPIREQAENIIHLFTLTNLGAPAAFKYFDTTIDRKQYRSTKEVLDATLIHQSITGLYETRIDLSQLGGD

SEQ ID NO: 1881 - protein, 1368 aa, synthetic construct
MDKKYSIGLDIGTNSVGWAVITDEYKVPSKKFKVLGNTDRHSIKKNLIGALLFDSGETAERTRLKRTARRRYTRRKNRICYLQEIFSNEMAKVDDSFFHRLEESFLVEEDKKHERHPIFGNIVDEVAYHEKYPTIYHLRKKLVDSTDKADLRLIYLALAHMIKFRGHFLIEGDLNPDNSDVDKLFIQLVQTYNQLFEENPINASGVDAKAILSARLSKSRRLENLIAQLPGEKKNGLFGNLIALSLGLTPNFKSNFDLAEDAKLQLSKDTYDDDLDNLLAQIGDQYADLFLAAKNLSDAILLSDILRVNTEITKAPLSASMIKRYDEHHQDLTLLKALVRQQLPEKYKEIFFDQSKNGYAGYIDGGASQEEFYKFIKPILEKMDGTEELLVKLNREDLLRKQRTFDNGSIPHQIHLGELHAILRRQEDFYPFLKDNREKIEKILTFRIPYYVGPLARGNSRFAWMTRKSEETITPWNFEEVVDKGASAQSFIERMTNFDKNLPNEKVLPKHSLLYEYFTVYNELTKVKYVTEGMRKPAFLSGEQKKAIVDLLFKTNRKVTVKQLKEDYFKKIECFDSVEISGVEDRFNASLGTYHDLLKIIKDKDFLDNEENEDILEDIVLTLTLFEDREMIEERLKTYAHLFDDKVMKQLKRRRYTGWGRLSRKLINGIRDKQSGKTILDFLKSDGFANRNFMQLIHDDSLTFKEDIQKAQVSGQGDSLHEHIANLAGSPAIKKGILQTVKVVDELVKVMGRHKPENIVIEMARENQTTQKGQKNSRERMKRIEEGIKELGSQILKEHPVENTQLQNEKLYLYYLQNGRDMYVDQELDINRLSDYDVDHIVPQSFLKDDSIDNKVLTRSDKNRGKSDNVPSEEVVKKMKNYWRQLLNAKLITQRKFDNLTKAERGGLSELDKAGFIKRQLVETRQITKHVAQILDSRMNTKYDENDKLIREVKVITLKSKLVSDFRKDFQFYKVREINNYHHAHDAYLNAVVGTALIKKYPKLESEFVYGDYKVYDVRKMIAKSEQEIGKATAKYFFYSNIMNFFKTEITLANGEIRKRPLIETNGETGEIVWDKGRDFATVRKVLSMPQVNIVKKTEVQTGGFSKESIRPKRNSDKLIARKKDWDPKKYGGFLWPTVAYSVLVVAKVEKGKSKKLKSVKELLGITIMERSSFEKNPIDFLEAKGYKEVKKDLIIKLPKYSLFELENGRKRMLASAKQLQKGNELALPSKYVNFLYLASHYEKLKGSPEDNEQKQLFVEQHKHYLDEIIEQISEFSKRVILADANLDKVLSAYNKHRDKPIREQAENIIHLFTLTRLGAPRAFKYFDTTIDPKQYRSTKEVLDATLIHQSITGLYETRIDLSQLGGD

SEQ ID NO: 1882 - protein, 1368 aa, synthetic construct
MDKKYSIGLDIGTNSVGWAVITDEYKVPSKKFKVLGNTDRHSIKKNLIGALLFDSGETAERTRLKRTARRRYTRRKNRICYLQEIFSNEMAKVDDSFFHRLEESFLVEEDKKHERHPIFGNIVDEVAYHEKYPTIYHLRKKLVDSTDKADLRLIYLALAHMIKFRGHFLIEGDLNPDNSDVDKLFIQLVQTYNQLFEENPINASGVDAKAILSARLSKSRRLENLIAQLPGEKKNGLFGNLIALSLGLTPNFKSNFDLAEDAKLQLSKDTYDDDLDNLLAQIGDQYADLFLAAKNLSDAILLSDILRVNTEITKAPLSASMIKRYDEHHQDLTLLKALVRQQLPEKYKEIFFDQSKNGYAGYIDGGASQEEFYKFIKPILEKMDGTEELLVKLNREDLLRKQRTFDNGSIPHQIHLGELHAILRRQEDFYPFLKDNREKIEKILTFRIPYYVGPLARGNSRFAWMTRKSEETITPWNFEEVVDKGASAQSFIERMTNFDKNLPNEKVLPKHSLLYEYFTVYNELTKVKYVTEGMRKPAFLSGEQKKAIVDLLFKTNRKVTVKQLKEDYFKKIECFDSVEISGVEDRFNASLGTYHDLLKIIKDKDFLDNEENEDILEDIVLTLTLFEDREMIEERLKTYAHLFDDKVMKQLKRRRYTGWGRLSRKLINGIRDKQSGKTILDFLKSDGFANRNFMQLIHDDSLTFKEDIQKAQVSGQGDSLHEHIANLAGSPAIKKGILQTVKVVDELVKVMGRHKPENIVIEMARENQTTQKGQKNSRERMKRIEEGIKELGSQILKEHPVENTQLQNEKLYLYYLQNGRDMYVDQELDINRLSDYDVDAIVPQSFLKDDSIDNKVLTRSDKNRGKSDNVPSEEVVKKMKNYWRQLLNAKLITQRKFDNLTKAERGGLSELDKAGFIKRQLVETRQITKHVAQILDSRMNTKYDENDKLIREVKVITLKSKLVSDFRKDFQFYKVREINNYHHAHDAYLNAVVGTALIKKYPKLESEFVYGDYKVYDVRKMIAKSEQEIGKATAKYFFYSNIMNFFKTEITLANGEIRKRPLIETNGETGEIVWDKGRDFATVRKVLSMPQVNIVKKTEVQTGGFSKESIRPKRNSDKLIARKKDWDPKKYGGFLWPTVAYSVLVVAKVEKGKSKKLKSVKELLGITIMERSSFEKNPIDFLEAKGYKEVKKDLIIKLPKYSLFELENGRKRMLASAKQLQKGNELALPSKYVNFLYLASHYEKLKGSPEDNEQKQLFVEQHKHYLDEIIEQISEFSKRVILADANLDKVLSAYNKHRDKPIREQAENIIHLFTLTRLGAPRAFKYFDTTIDPKQYRSTKEVLDATLIHQSITGLYETRIDLSQLGGD

SEQ ID NO: 1883 - protein, 1367 aa, synthetic construct
DKKYSIGLDIGTNSVGWAVITDEYKVPSKKFKVLGNTDRHSIKKNLIGALLFDSGETAERTRLKRTARRRYTRRKNRICYLQEIFSNEMAKVDDSFFHRLEESFLVEEDKKHERHPIFGNIVDEVAYHEKYPTIYHLRKKLVDSTDKADLRLIYLALAHMIKFRGHFLIEGDLNPDNSDVDKLFIQLVQTYNQLFEENPINASGVDAKAILSARLSKSRRLENLIAQLPGEKKNGLFGNLIALSLGLTPNFKSNFDLAEDAKLQLSKDTYDDDLDNLLAQIGDQYADLFLAAKNLSDAILLSDILRVNTEITKAPLSASMIKRYDEHHQDLTLLKALVRQQLPEKYKEIFFDQSKNGYAGYIDGGASQEEFYKFIKPILEKMDGTEELLVKLNREDLLRKQRTFDNGSIPHQIHLGELHAILRRQEDFYPFLKDNREKIEKILTFRIPYYVGPLARGNSRFAWMTRKSEETITPWNFEEVVDKGASAQSFIERMTNFDKNLPNEKVLPKHSLLYEYFTVYNELTKVKYVTEGMRKPAFLSGEQKKAIVDLLFKTNRKVTVKQLKEDYFKKIECFDSVEISGVEDRFNASLGTYHDLLKIIKDKDFLDNEENEDILEDIVLTLTLFEDREMIEERLKTYAHLFDDKVMKQLKRRRYTGWGRLSRKLINGIRDKQSGKTILDFLKSDGFANRNFMQLIHDDSLTFKEDIQKAQVSGQGDSLHEHIANLAGSPAIKKGILQTVKVVDELVKVMGRHKPENIVIEMARENQTTQKGQKNSRERMKRIEEGIKELGSQILKEHPVENTQLQNEKLYLYYLQNGRDMYVDQELDINRLSDYDVDAIVPQSFLKDDSIDNKVLTRSDKNRGKSDNVPSEEVVKKMKNYWRQLLNAKLITQRKFDNLTKAERGGLSELDKAGFIKRQLVETRQITKHVAQILDSRMNTKYDENDKLIREVKVITLKSKLVSDFRKDFQFYKVREINNYHHAHDAYLNAVVGTALIKKYPKLESEFVYGDYKVYDVRKMIAKSEQEIGKATAKYFFYSNIMNFFKTEITLANGEIRKRPLIETNGETGEIVWDKGRDFATVRKVLSMPQVNIVKKTEVQTGGFSKESIRPKRNSDKLIARKKDWDPKKYGGFLWPTVAYSVLVVAKVEKGKSKKLKSVKELLGITIMERSSFEKNPIDFLEAKGYKEVKKDLIIKLPKYSLFELENGRKRMLASAKQLQKGNELALPSKYVNFLYLASHYEKLKGSPEDNEQKQLFVEQHKHYLDEIIEQISEFSKRVILADANLDKVLSAYNKHRDKPIREQAENIIHLFTLTRLGAPRAFKYFDTTIDPKQYRSTKEVLDATLIHQSITGLYETRIDLSQLGGD

SEQ ID NO: 1884 - protein, 1057 aa, synthetic construct
MNQKFILGLDIGITSVGYGLIDYETKNIIDAGVRLFPEANVENNEGRRSKRGSRRLKRRRIHRLERVKLLLTEYDLINKEQIPTSNNPYQIRVKGLSEILSKDELAIALLHLAKRRGIHNVDVAADKEETASDSLSTKDQINKNAKFLESRYVCELQKERLENEGHVRGVENRFLTKDIVREAKKIIDTQMQYYPEIDETFKEKYISLVETRREYFEGPGQGSPFGWNGDLKKWYEMLMGHCTYFPQELRSVKYAYSADLFNALNDLNNLIIQRDNSEKLEYHEKYHIIENVFKQKKKPTLKQIAKEIGVNPEDIKGYRITKSGTPEFTSFKLFHDLKKVVKDHAILDDIDLLNQIAEILTIYQDKDSIVAELGQLEYLMSEADKQSISELTGYTGTHSLSLKCMNMIIDELWHSSMNQMEVFTYLNMRPKKYELKGYQRIPTDMIDDAILSPVVKRTFIQSINVINKVIEKYGIPEDIIIELARENNSDDRKKFINNLQKKNEATRKRINEIIGQTGNQNAKRIVEKIRLHDQQEGKCLYSLESIPLEDLLNNPNHYEVDHIIPRSVSFDNSYHNKVLVKQSENSKKSNLTPYQYFNSGKSKLSYNQFKQHILNLSKSQDRISKKKKEYLLEERDINKFEVQKEFINRNLVDTRYATRELTNYLKAYFSANNMNVKVKTINGSFTDYLRKVWKFKKERNHGYKHHAEDALIIANADFLFKENKKLKAVNSVLEKPEIETKQLDIQVDSEDNYSEMFIIPKQVQDIKDFRNFKYSHRVDKKPNRQLINDTLYSTRKKDNSTYIVQTIKDIYAKDNTTLKKQFDKSPEKFLMYQHDPRTFEKLEVIMKQYANEKNPLAKYHEETGEYLTKYSKKNNGPIVKSLKYIGNKLGSHLDVTHQFKSSTKKLVKLSIKNYRFDVYLTEKGYKFVTIAYLNVFKKDNYYYIPKDKYQELKEKKKIKDTDQFIASFYKNDLIKLNGDLYKIIGVNSDDRNIIELDYYDIKYKDYCEINNIKGEPRIKKTIGKKTESIEKFTTDVLGNLYLHSTEKAPQLIFKRGL

SEQ ID NO: 1885 - protein, 1057 aa, synthetic construct
MNQKFILGLDIGITSVGYGLIDYETKNIIDAGVRLFPEANVENNEGRRSKRGSRRLKRRRIHRLERVKLLLTEYDLINKEQIPTSNNPYQIRVKGLSEILSKDELAIALLHLAKRRGIHNVDVAADKEETASDSLSTKDQINKNAKFLESRYVCELQKERLENEGHVRGVENRFLTKDIVREAKKIIDTQMQYYPEIDETFKEKYISLVETRREYFEGPGQGSPFGWNGDLKKWYEMLMGHCTYFPQELRSVKYAYSADLFNALNDLNNLIIQRDNSEKLEYHEKYHIIENVFKQKKKPTLKQIAKEIGVNPEDIKGYRITKSGTPEFTSFKLFHDLKKVVKDHAILDDIDLLNQIAEILTIYQDKDSIVAELGQLEYLMSEADKQSISELTGYTGTHSLSLKCMNMIIDELWHSSMNQMEVFTYLNMRPKKYELKGYQRIPTDMIDDAILSPVVKRTFIQSINVINKVIEKYGIPEDIIIELARENNSDDRKKFINNLQKKNEATRKRINEIIGQTGNQNAKRIVEKIRLHDQQEGKCLYSLESIPLEDLLNNPNHYEVDHIIPRSVSFDNSYHNKVLVKQSEASKKSNLTPYQYFNSGKSKLSYNQFKQHILNLSKSQDRISKKKKEYLLEERDINKFEVQKEFINRNLVDTRYATRELTNYLKAYFSANNMNVKVKTINGSFTDYLRKVWKFKKERNHGYKHHAEDALIIANADFLFKENKKLKAVNSVLEKPEIETKQLDIQVDSEDNYSEMFIIPKQVQDIKDFRNFKYSHRVDKKPNRQLINDTLYSTRKKDNSTYIVQTIKDIYAKDNTTLKKQFDKSPEKFLMYQHDPRTFEKLEVIMKQYANEKNPLAKYHEETGEYLTKYSKKNNGPIVKSLKYIGNKLGSHLDVTHQFKSSTKKLVKLSIKNYRFDVYLTEKGYKFVTIAYLNVFKKDNYYYIPKDKYQELKEKKKIKDTDQFIASFYKNDLIKLNGDLYKIIGVNSDDRNIIELDYYDIKYKDYCEINNIKGEPRIKKTIGKKTESIEKFTTDVLGNLYLHSTEKAPQLIFKRGL

SEQ ID NO: 1886 - protein, 1056 aa, synthetic construct
NQKFILGLDIGITSVGYGLIDYETKNIIDAGVRLFPEANVENNEGRRSKRGSRRLKRRRIHRLERVKLLLTEYDLINKEQIPTSNNPYQIRVKGLSEILSKDELAIALLHLAKRRGIHNVDVAADKEETASDSLSTKDQINKNAKFLESRYVCELQKERLENEGHVRGVENRFLTKDIVREAKKIIDTQMQYYPEIDETFKEKYISLVETRREYFEGPGQGSPFGWNGDLKKWYEMLMGHCTYFPQELRSVKYAYSADLFNALNDLNNLIIQRDNSEKLEYHEKYHIIENVFKQKKKPTLKQIAKEIGVNPEDIKGYRITKSGTPEFTSFKLFHDLKKVVKDHAILDDIDLLNQIAEILTIYQDKDSIVAELGQLEYLMSEADKQSISELTGYTGTHSLSLKCMNMIIDELWHSSMNQMEVFTYLNMRPKKYELKGYQRIPTDMIDDAILSPVVKRTFIQSINVINKVIEKYGIPEDIIIELARENNSDDRKKFINNLQKKNEATRKRINEIIGQTGNQNAKRIVEKIRLHDQQEGKCLYSLESIPLEDLLNNPNHYEVDHIIPRSVSFDNSYHNKVLVKQSEASKKSNLTPYQYFNSGKSKLSYNQFKQHILNLSKSQDRISKKKKEYLLEERDINKFEVQKEFINRNLVDTRYATRELTNYLKAYFSANNMNVKVKTINGSFTDYLRKVWKFKKERNHGYKHHAEDALIIANADFLFKENKKLKAVNSVLEKPEIETKQLDIQVDSEDNYSEMFIIPKQVQDIKDFRNFKYSHRVDKKPNRQLINDTLYSTRKKDNSTYIVQTIKDIYAKDNTTLKKQFDKSPEKFLMYQHDPRTFEKLEVIMKQYANEKNPLAKYHEETGEYLTKYSKKNNGPIVKSLKYIGNKLGSHLDVTHQFKSSTKKLVKLSIKNYRFDVYLTEKGYKFVTIAYLNVFKKDNYYYIPKDKYQELKEKKKIKDTDQFIASFYKNDLIKLNGDLYKIIGVNSDDRNIIELDYYDIKYKDYCEINNIKGEPRIKKTIGKKTESIEKFTTDVLGNLYLHSTEKAPQLIFKRGL

SEQ ID NO: 1887 - protein, 1057 aa, synthetic construct
MNQKFILGLDIGITSVGYGLIDYETKNIIDAGVRLFPEANVENNEGRRSKRGSRRLKRRRIHRLERVKLLLTEYDLINKEQIPTSNNPYQIRVKGLSEILSKDELAIALLHLAKRRGIHNVDVAADKEETASDSLSTKDQINKNAKFLESRYVCELQKERLENEGHVRGVENRFLTKDIVREAKKIIDTQMQYYPEIDETFKEKYISLVETRREYFEGPGQGSPFGWNGDLKKWYEMLMGHCTYFPQELRSVKYAYSADLFNALNDLNNLIIQRDNSEKLEYHEKYHIIENVFKQKKKPTLKQIAKEIGVNPEDIKGYRITKSGTPEFTSFKLFHDLKKVVKDHAILDDIDLLNQIAEILTIYQDKDSIVAELGQLEYLMSEADKQSISELTGYTGTHSLSLKCMNMIIDELWHSSMNQMEVFTYLNMRPKKYELKGYQRIPTDMIDDAILSPVVKRTFIQSINVINKVIEKYGIPEDIIIELARENNSDDRKKFINNLQKKNEATRKRINEIIGQTGNQNAKRIVEKIRLHDQQEGKCLYSLESIPLEDLLNNPNHYEVDHIIPRSVSFDNSYHNKVLVKQSENSKKSNLTPYQYFNSGKSKLSYNQFKQHILNLSKSQDRISKKKKEYLLEERDINKFEVQKEFINRNLVDTRYATRELTSYLKAYFSANNMDVKVKTINGSFTNHLRKVWRFDKYRNHGYKHHAEDALIIANADFLFKENKKLQNTNKILEKPTIENNTKKVTVEKEEDYNNVFETPKLVEDIKQYRDYKFSHRVDKKPNRQLINDTLYSTRMKDEHDYIVQTITDIYGKDNTNLKKQFNKNPEKFLMYQNDPKTFEKLSIIMKQYSDEKNPLAKYYEETGEYLTKYSKKNNGPIVKKIKLLGNKVGNHLDVTNKYENSTKKLVKLSIKNYRFDVYLTEKGYKFVTIAYLNVFKKDNYYYIPKDKYQELKEKKKIKDTDQFIASFYKNDLIKLNGDLYKIIGVNSDDRNIIELDYYDIKYKDYCEINNIKGEPRIKKTIGKKTESIEKFTTDVLGNLYLHSTEKAPQLIFKRGL

SEQ ID NO: 1888 - protein, 1057 aa, synthetic construct
MNQKFILGLDIGITSVGYGLIDYETKNIIDAGVRLFPEANVENNEGRRSKRGSRRLKRRRIHRLERVKLLLTEYDLINKEQIPTSNNPYQIRVKGLSEILSKDELAIALLHLAKRRGIHNVDVAADKEETASDSLSTKDQINKNAKFLESRYVCELQKERLENEGHVRGVENRFLTKDIVREAKKIIDTQMQYYPEIDETFKEKYISLVETRREYFEGPGQGSPFGWNGDLKKWYEMLMGHCTYFPQELRSVKYAYSADLFNALNDLNNLIIQRDNSEKLEYHEKYHIIENVFKQKKKPTLKQIAKEIGVNPEDIKGYRITKSGTPEFTSFKLFHDLKKVVKDHAILDDIDLLNQIAEILTIYQDKDSIVAELGQLEYLMSEADKQSISELTGYTGTHSLSLKCMNMIIDELWHSSMNQMEVFTYLNMRPKKYELKGYQRIPTDMIDDAILSPVVKRTFIQSINVINKVIEKYGIPEDIIIELARENNSDDRKKFINNLQKKNEATRKRINEIIGQTGNQNAKRIVEKIRLHDQQEGKCLYSLESIPLEDLLNNPNHYEVDHIIPRSVSFDNSYHNKVLVKQSEASKKSNLTPYQYFNSGKSKLSYNQFKQHILNLSKSQDRISKKKKEYLLEERDINKFEVQKEFINRNLVDTRYATRELTSYLKAYFSANNMDVKVKTINGSFTNHLRKVWRFDKYRNHGYKHHAEDALIIANADFLFKENKKLQNTNKILEKPTIENNTKKVTVEKEEDYNNVFETPKLVEDIKQYRDYKFSHRVDKKPNRQLINDTLYSTRMKDEHDYIVQTITDIYGKDNTNLKKQFNKNPEKFLMYQNDPKTFEKLSIIMKQYSDEKNPLAKYYEETGEYLTKYSKKNNGPIVKKIKLLGNKVGNHLDVTNKYENSTKKLVKLSIKNYRFDVYLTEKGYKFVTIAYLNVFKKDNYYYIPKDKYQELKEKKKIKDTDQFIASFYKNDLIKLNGDLYKIIGVNSDDRNIIELDYYDIKYKDYCEINNIKGEPRIKKTIGKKTESIEKFTTDVLGNLYLHSTEKAPQLIFKRGL

SEQ ID NO: 1889 - protein, 1056 aa, synthetic construct
NQKFILGLDIGITSVGYGLIDYETKNIIDAGVRLFPEANVENNEGRRSKRGSRRLKRRRIHRLERVKLLLTEYDLINKEQIPTSNNPYQIRVKGLSEILSKDELAIALLHLAKRRGIHNVDVAADKEETASDSLSTKDQINKNAKFLESRYVCELQKERLENEGHVRGVENRFLTKDIVREAKKIIDTQMQYYPEIDETFKEKYISLVETRREYFEGPGQGSPFGWNGDLKKWYEMLMGHCTYFPQELRSVKYAYSADLFNALNDLNNLIIQRDNSEKLEYHEKYHIIENVFKQKKKPTLKQIAKEIGVNPEDIKGYRITKSGTPEFTSFKLFHDLKKVVKDHAILDDIDLLNQIAEILTIYQDKDSIVAELGQLEYLMSEADKQSISELTGYTGTHSLSLKCMNMIIDELWHSSMNQMEVFTYLNMRPKKYELKGYQRIPTDMIDDAILSPVVKRTFIQSINVINKVIEKYGIPEDIIIELARENNSDDRKKFINNLQKKNEATRKRINEIIGQTGNQNAKRIVEKIRLHDQQEGKCLYSLESIPLEDLLNNPNHYEVDHIIPRSVSFDNSYHNKVLVKQSEASKKSNLTPYQYFNSGKSKLSYNQFKQHILNLSKSQDRISKKKKEYLLEERDINKFEVQKEFINRNLVDTRYATRELTSYLKAYFSANNMDVKVKTINGSFTNHLRKVWRFDKYRNHGYKHHAEDALIIANADFLFKENKKLQNTNKILEKPTIENNTKKVTVEKEEDYNNVFETPKLVEDIKQYRDYKFSHRVDKKPNRQLINDTLYSTRMKDEHDYIVQTITDIYGKDNTNLKKQFNKNPEKFLMYQNDPKTFEKLSIIMKQYSDEKNPLAKYYEETGEYLTKYSKKNNGPIVKKIKLLGNKVGNHLDVTNKYENSTKKLVKLSIKNYRFDVYLTEKGYKFVTIAYLNVFKKDNYYYIPKDKYQELKEKKKIKDTDQFIASFYKNDLIKLNGDLYKIIGVNSDDRNIIELDYYDIKYKDYCEINNIKGEPRIKKTIGKKTESIEKFTTDVLGNLYLHSTEKAPQLIFKRGL

SEQ ID NO: 1890 - protein, 1368 aa, synthetic construct
MDKKYSIGLDIGTNSVGWAVITDEYKVPSKKFKVLGNTDRHSIKKNLIGALLFDSGETAEATRLKRTARRRYTRRKNRICYLQEIFSNEMAKVDDSFFHRLEESFLVEEDKKHERHPIFGNIVDEVAYHEKYPTIYHLRKKLVDSTDKADLRLIYLALAHMIKFRGHFLIEGDLNPDNSDVDKLFIQLVQTYNQLFEENPINASGVDAKAILSARLSKSRRLENLIAQLPGEKKNGLFGNLIALSLGLTPNFKSNFDLAEDAKLQLSKDTYDDDLDNLLAQIGDQYADLFLAAKNLSDAILLSDILRVNTEITKAPLSASMIKRYDEHHQDLTLLKALVRQQLPEKYKEIFFDQSKNGYAGYIDGGASQEEFYKFIKPILEKMDGTEELLVKLNREDLLRKQRTFDNGSIPHQIHLGELHAILRRQEDFYPFLKDNREKIEKILTFRIPYYVGPLARGNSRFAWMTRKSEETITPWNFEEVVDKGASAQSFIERMTNFDKNLPNEKVLPKHSLLYEYFTVYNELTKVKYVTEGMRKPAFLSGEQKKAIVDLLFKTNRKVTVKQLKEDYFKKIECFDSVEISGVEDRFNASLGTYHDLLKIIKDKDFLDNEENEDILEDIVLTLTLFEDREMIEERLKTYAHLFDDKVMKQLKRRRYTGWGRLSRKLINGIRDKQSGKTILDFLKSDGFANRNFMQLIHDDSLTFKEDIQKAQVSGQGDSLHEHIANLAGSPAIKKGILQTVKVVDELVKVMGRHKPENIVIEMARENQTTQKGQKNSRERMKRIEEGIKELGSQILKEHPVENTQLQNEKLYLYYLQNGRDMYVDQELDINRLSDYDVDHIVPQSFLKDDSIDNKVLTRSDKNRGKSDNVPSEEVVKKMKNYWRQLLNAKLITQRKFDNLTKAERGGLSELDKAGFIKRQLVETRQITKHVAQILDSRMNTKYDENDKLIREVKVITLKSKLVSDFRKDFQFYKVREINNYHHAHDAYLNAVVGTALIKKYPKLESEFVYGDYKVYDVRKMIAKSEQEIGKATAKYFFYSNIMNFFKTEITLANGEIRKRPLIETNGETGEIVWDKGRDFATVRKVLSMPQVNIVKKTEVQTGGFSKESILPKRNSDKLIARKKDWDPKKYGGFLWPTVAYSVLVVAKVEKGKSKKLKSVKELLGITIMERSSFEKNPIDFLEAKGYKEVKKDLIIKLPKYSLFELENGRKRMLASAKQLQKGNELALPSKYVNFLYLASHYEKLKGSPEDNEQKQLFVEQHKHYLDEIIEQISEFSKRVILADANLDKVLSAYNKHRDKPIREQAENIIHLFTLTNLGAPAAFKYFDTTIDRKQYRSTKEVLDATLIHQSITGLYETRIDLSQLGGD

SEQ ID NO: 1891 - protein, 1368 aa, synthetic construct
MDKKYSIGLDIGTNSVGWAVITDEYKVPSKKFKVLGNTDRHSIKKNLIGALLFDSGETAEATRLKRTARRRYTRRKNRICYLQEIFSNEMAKVDDSFFHRLEESFLVEEDKKHERHPIFGNIVDEVAYHEKYPTIYHLRKKLVDSTDKADLRLIYLALAHMIKFRGHFLIEGDLNPDNSDVDKLFIQLVQTYNQLFEENPINASGVDAKAILSARLSKSRRLENLIAQLPGEKKNGLFGNLIALSLGLTPNFKSNFDLAEDAKLQLSKDTYDDDLDNLLAQIGDQYADLFLAAKNLSDAILLSDILRVNTEITKAPLSASMIKRYDEHHQDLTLLKALVRQQLPEKYKEIFFDQSKNGYAGYIDGGASQEEFYKFIKPILEKMDGTEELLVKLNREDLLRKQRTFDNGSIPHQIHLGELHAILRRQEDFYPFLKDNREKIEKILTFRIPYYVGPLARGNSRFAWMTRKSEETITPWNFEEVVDKGASAQSFIERMTNFDKNLPNEKVLPKHSLLYEYFTVYNELTKVKYVTEGMRKPAFLSGEQKKAIVDLLFKTNRKVTVKQLKEDYFKKIECFDSVEISGVEDRFNASLGTYHDLLKIIKDKDFLDNEENEDILEDIVLTLTLFEDREMIEERLKTYAHLFDDKVMKQLKRRRYTGWGRLSRKLINGIRDKQSGKTILDFLKSDGFANRNFMQLIHDDSLTFKEDIQKAQVSGQGDSLHEHIANLAGSPAIKKGILQTVKVVDELVKVMGRHKPENIVIEMARENQTTQKGQKNSRERMKRIEEGIKELGSQILKEHPVENTQLQNEKLYLYYLQNGRDMYVDQELDINRLSDYDVDAIVPQSFLKDDSIDNKVLTRSDKNRGKSDNVPSEEVVKKMKNYWRQLLNAKLITQRKFDNLTKAERGGLSELDKAGFIKRQLVETRQITKHVAQILDSRMNTKYDENDKLIREVKVITLKSKLVSDFRKDFQFYKVREINNYHHAHDAYLNAVVGTALIKKYPKLESEFVYGDYKVYDVRKMIAKSEQEIGKATAKYFFYSNIMNFFKTEITLANGEIRKRPLIETNGETGEIVWDKGRDFATVRKVLSMPQVNIVKKTEVQTGGFSKESILPKRNSDKLIARKKDWDPKKYGGFLWPTVAYSVLVVAKVEKGKSKKLKSVKELLGITIMERSSFEKNPIDFLEAKGYKEVKKDLIIKLPKYSLFELENGRKRMLASAKQLQKGNELALPSKYVNFLYLASHYEKLKGSPEDNEQKQLFVEQHKHYLDEIIEQISEFSKRVILADANLDKVLSAYNKHRDKPIREQAENIIHLFTLTNLGAPAAFKYFDTTIDRKQYRSTKEVLDATLIHQSITGLYETRIDLSQLGGD

SEQ ID NO: 1892 - protein, 1367 aa, synthetic construct
DKKYSIGLDIGTNSVGWAVITDEYKVPSKKFKVLGNTDRHSIKKNLIGALLFDSGETAEATRLKRTARRRYTRRKNRICYLQEIFSNEMAKVDDSFFHRLEESFLVEEDKKHERHPIFGNIVDEVAYHEKYPTIYHLRKKLVDSTDKADLRLIYLALAHMIKFRGHFLIEGDLNPDNSDVDKLFIQLVQTYNQLFEENPINASGVDAKAILSARLSKSRRLENLIAQLPGEKKNGLFGNLIALSLGLTPNFKSNFDLAEDAKLQLSKDTYDDDLDNLLAQIGDQYADLFLAAKNLSDAILLSDILRVNTEITKAPLSASMIKRYDEHHQDLTLLKALVRQQLPEKYKEIFFDQSKNGYAGYIDGGASQEEFYKFIKPILEKMDGTEELLVKLNREDLLRKQRTFDNGSIPHQIHLGELHAILRRQEDFYPFLKDNREKIEKILTFRIPYYVGPLARGNSRFAWMTRKSEETITPWNFEEVVDKGASAQSFIERMTNFDKNLPNEKVLPKHSLLYEYFTVYNELTKVKYVTEGMRKPAFLSGEQKKAIVDLLFKTNRKVTVKQLKEDYFKKIECFDSVEISGVEDRFNASLGTYHDLLKIIKDKDFLDNEENEDILEDIVLTLTLFEDREMIEERLKTYAHLFDDKVMKQLKRRRYTGWGRLSRKLINGIRDKQSGKTILDFLKSDGFANRNFMQLIHDDSLTFKEDIQKAQVSGQGDSLHEHIANLAGSPAIKKGILQTVKVVDELVKVMGRHKPENIVIEMARENQTTQKGQKNSRERMKRIEEGIKELGSQILKEHPVENTQLQNEKLYLYYLQNGRDMYVDQELDINRLSDYDVDAIVPQSFLKDDSIDNKVLTRSDKNRGKSDNVPSEEVVKKMKNYWRQLLNAKLITQRKFDNLTKAERGGLSELDKAGFIKRQLVETRQITKHVAQILDSRMNTKYDENDKLIREVKVITLKSKLVSDFRKDFQFYKVREINNYHHAHDAYLNAVVGTALIKKYPKLESEFVYGDYKVYDVRKMIAKSEQEIGKATAKYFFYSNIMNFFKTEITLANGEIRKRPLIETNGETGEIVWDKGRDFATVRKVLSMPQVNIVKKTEVQTGGFSKESILPKRNSDKLIARKKDWDPKKYGGFLWPTVAYSVLVVAKVEKGKSKKLKSVKELLGITIMERSSFEKNPIDFLEAKGYKEVKKDLIIKLPKYSLFELENGRKRMLASAKQLQKGNELALPSKYVNFLYLASHYEKLKGSPEDNEQKQLFVEQHKHYLDEIIEQISEFSKRVILADANLDKVLSAYNKHRDKPIREQAENIIHLFTLTNLGAPAAFKYFDTTIDRKQYRSTKEVLDATLIHQSITGLYETRIDLSQLGGD

SEQ ID NO: 1893 - protein, 30 aa, synthetic construct
MDSLLMNRRKFLYQFKNVRWAKGRRETYLC

SEQ ID NO: 1894 - protein, 18 aa, synthetic construct
KRTADGSEFESPKKKRKV

SEQ ID NO: 1895 - protein, 17 aa, synthetic construct
KRTADGSEFEPKKKRKV

SEQ ID NO: 1896 - protein, 19 aa, synthetic construct
NLSKRPAAIKKAGQAKKKK

SEQ ID NO: 1897 - protein, 11 aa, synthetic construct
RQRRNELKRSF

SEQ ID NO: 1898 - protein, 38 aa, synthetic construct
NQSSNFGPMKGGNFGGRSSGPYGGGGQYFAKPRNQGGY

SEQ ID NO: 1899 - protein, 7 aa, synthetic construct
PKKKRKV

SEQ ID NO: 1900 - protein, 16 aa, synthetic construct
KRXXXXXXXXXXKKKL

SEQ ID NO: 1901 - protein, 16 aa, synthetic construct
KRPAATKKAGQAKKKK

SEQ ID NO: 1902 - protein, 19 aa, synthetic construct
MKRTADGSEFESPKKKRKV

SEQ ID NO: 1903 - protein, 20 aa, synthetic construct
AVKRPAATKKAGQAKKKKLD

SEQ ID NO: 1904 - protein, 25 aa, synthetic construct
MSRRRKANPTKLSENAKKLAKEVEN

SEQ ID NO: 1905 - protein, 9 aa, synthetic construct
PAAKRVKLD

SEQ ID NO: 1906 - protein, 9 aa, synthetic construct
KLKIKRPVK

SEQ ID NO: 1907 - protein, 8 aa, synthetic construct
VSRKRPRP

SEQ ID NO: 1908 - protein, 10 aa, synthetic construct
EGAPPAKRAR

SEQ ID NO: 1909 - protein, 16 aa, synthetic construct
RQARRNRRRRWRERNR

SEQ ID NO: 1910 - protein, 12 aa, synthetic construct
PPQPKKKPLDGE

SEQ ID NO: 1911 - protein, 21 aa, synthetic construct
SGGSKRTADGSEFEPKKKRKV

SEQ ID NO: 1912 - RNA, 33 nt, synthetic construct
  source 1..33: mol_type = other RNA
gccaacatgaggatcacccatgtctgcagggcc

SEQ ID NO: 1913 - protein, 131 aa, synthetic construct
GSASNFTQFVLVDNGGTGDVTVAPSNFANGVAEWISSNSRSQAYKVTCSVRQSSAQNRKYTIKVEVPKVATQTVGGEELPVAGWRSYLNMELTIPIFATNSDCELIVKAMQGLLKDGNPIPSAIAANSGIY

SEQ ID NO: 1914 - protein, 150 aa, synthetic construct
  SITE 1..150: note = This sequence may encompass 1-30 GGGGS repeating units
GGGGSGGGGSGGGGSGGGGSGGGGSGGGGSGGGGSGGGGSGGGGSGGGGSGGGGSGGGGSGGGGSGGGGSGGGGSGGGGSGGGGSGGGGSGGGGSGGGGSGGGGSGGGGSGGGGSGGGGSGGGGSGGGGSGGGGSGGGGSGGGGSGGGGS

SEQ ID NO: 1915 - protein, 30 aa, synthetic construct
  SITE 1..30: note = This sequence may encompass 1-30 residues
GGGGGGGGGGGGGGGGGGGGGGGGGGGGGG

SEQ ID NO: 1916 - protein, 150 aa, synthetic construct
  SITE 1..150: note = This sequence may encompass 1-30 EAAAK repeating units
EAAAKEAAAKEAAAKEAAAKEAAAKEAAAKEAAAKEAAAKEAAAKEAAAKEAAAKEAAAKEAAAKEAAAKEAAAKEAAAKEAAAKEAAAKEAAAKEAAAKEAAAKEAAAKEAAAKEAAAKEAAAKEAAAKEAAAKEAAAKEAAAKEAAAK

SEQ ID NO: 1917 - protein, 90 aa, synthetic construct
  SITE 1..90: note = This sequence may encompass 1-30 GGS repeating units
GGSGGSGGSGGSGGSGGSGGSGGSGGSGGSGGSGGSGGSGGSGGSGGSGGSGGSGGSGGSGGSGGSGGSGGSGGSGGSGGSGGSGGSGGS

SEQ ID NO: 1918 - protein, 120 aa, synthetic construct
  SITE 1..120: note = This sequence may encompass 1-30 SGGS repeating units
SGGSSGGSSGGSSGGSSGGSSGGSSGGSSGGSSGGSSGGSSGGSSGGSSGGSSGGSSGGSSGGSSGGSSGGSSGGSSGGSSGGSSGGSSGGSSGGSSGGSSGGSSGGSSGGSSGGSSGGS

SEQ ID NO: 1919 - protein, 60 aa, synthetic construct
  SITE 1..60: note = This sequence may encompass 1-30 XP repeating units wherein X is any amino acid
XPXPXPXPXPXPXPXPXPXPXPXPXPXPXPXPXPXPXPXPXPXPXPXPXPXPXPXPXPXP

SEQ ID NO: 1920 - protein, 16 aa, synthetic construct
SGSETPGTSESATPES

SEQ ID NO: 1921 - protein, 32 aa, synthetic construct
SGGSSGGSSGSETPGTSESATPESSGGSSGGS

SEQ ID NO: 1922 - protein, 10 aa, synthetic construct
SGGSGGSGGS

SEQ ID NO: 1923 - protein, 4 aa, synthetic construct
SGGS

SEQ ID NO: 1924 - protein, 60 aa, synthetic construct
SGGSSGGSSGSETPGTSESATPESAGSYPYDVPDYAGSAAPAAKKKKLDGSGSGGSSGGS

SEQ ID NO: 1925 - protein, 6 aa, synthetic construct
GGSGGS

SEQ ID NO: 1926 - protein, 9 aa, synthetic construct
GGSGGSGGS

SEQ ID NO: 1927 - protein, 33 aa, synthetic construct
SGGSSGGSSGSETPGTSESATPESSGGSSGGSS

SEQ ID NO: 1928 - protein, 34 aa, synthetic construct
SGGSSGGSKRTADGSEFESPKKKRKVSGGSSGGS

SEQ ID NO: 1929 - protein, 22 aa, synthetic construct
SGGSKRTADGSEFESPKKKRKV

SEQ ID NO: 1930 - protein, 12 aa, synthetic construct
GSGPAAKRVKLD

SEQ ID NO: 1931 - protein, 2117 aa, synthetic construct
MKRTADGSEFESPKKKRKVDKKYSIGLDIGTNSVGWAVITDEYKVPSKKFKVLGNTDRHSIKKNLIGALLFDSGETAEATRLKRTARRRYTRRKNRICYLQEIFSNEMAKVDDSFFHRLEESFLVEEDKKHERHPIFGNIVDEVAYHEKYPTIYHLRKKLVDSTDKADLRLIYLALAHMIKFRGHFLIEGDLNPDNSDVDKLFIQLVQTYNQLFEENPINASGVDAKAILSARLSKSRRLENLIAQLPGEKKNGLFGNLIALSLGLTPNFKSNFDLAEDAKLQLSKDTYDDDLDNLLAQIGDQYADLFLAAKNLSDAILLSDILRVNTEITKAPLSASMIKRYDEHHQDLTLLKALVRQQLPEKYKEIFFDQSKNGYAGYIDGGASQEEFYKFIKPILEKMDGTEELLVKLNREDLLRKQRTFDNGSIPHQIHLGELHAILRRQEDFYPFLKDNREKIEKILTFRIPYYVGPLARGNSRFAWMTRKSEETITPWNFEEVVDKGASAQSFIERMTNFDKNLPNEKVLPKHSLLYEYFTVYNELTKVKYVTEGMRKPAFLSGEQKKAIVDLLFKTNRKVTVKQLKEDYFKKIECFDSVEISGVEDRFNASLGTYHDLLKIIKDKDFLDNEENEDILEDIVLTLTLFEDREMIEERLKTYAHLFDDKVMKQLKRRRYTGWGRLSRKLINGIRDKQSGKTILDFLKSDGFANRNFMQLIHDDSLTFKEDIQKAQVSGQGDSLHEHIANLAGSPAIKKGILQTVKVVDELVKVMGRHKPENIVIEMARENQTTQKGQKNSRERMKRIEEGIKELGSQILKEHPVENTQLQNEKLYLYYLQNGRDMYVDQELDINRLSDYDVDAIVPQSFLKDDSIDNKVLTRSDKNRGKSDNVPSEEVVKKMKNYWRQLLNAKLITQRKFDNLTKAERGGLSELDKAGFIKRQLVETRQITKHVAQILDSRMNTKYDENDKLIREVKVITLKSKLVSDFRKDFQFYKVREINNYHHAHDAYLNAVVGTALIKKYPKLESEFVYGDYKVYDVRKMIAKSEQEIGKATAKYFFYSNIMNFFKTEITLANGEIRKRPLIETNGETGEIVWDKGRDFATVRKVLSMPQVNIVKKTEVQTGGFSKESILPKRNSDKLIARKKDWDPKKYGGFDSPTVAYSVLVVAKVEKGKSKKLKSVKELLGITIMERSSFEKNPIDFLEAKGYKEVKKDLIIKLPKYSLFELENGRKRMLASAGELQKGNELALPSKYVNFLYLASHYEKLKGSPEDNEQKQLFVEQHKHYLDEIIEQISEFSKRVILADANLDKVLSAYNKHRDKPIREQAENIIHLFTLTNLGAPAAFKYFDTTIDRKRYTSTKEVLDATLIHQSITGLYETRIDLSQLGGDSGGSSGGSSGSETPGTSESATPESSGGSSGGSSTLNIEDEYRLHETSKEPDVSLGSTWLSDFPQAWAETGGMGLAVRQAPLIIPLKATSTPVSIKQYPMSQEARLGIKPHIQRLLDQGILVPCQSPWNTPLLPVKKPGTNDYRPVQDLREVNKRVEDIHPTVPNPYNLLSGLPPSHQWYTVLDLKDAFFCLRLHPTSQPLFAFEWRDPEMGISGQLTWTRLPQGFKNSPTLFNEALHRDLADFRIQHPDLILLQYVDDLLLAATSELDCQQGTRALLQTLGNLGYRASAKKAQICQKQVKYLGYLLKEGQRWLTEARKETVMGQPTPKTPRQLREFLGKAGFCRLFIPGFAEMAAPLYPLTKPGTLFNWGPDQQKAYQEIKQALLTAPALGLPDLTKPFELFVDEKQGYAKGVLTQKLGPWRRPVAYLSKKLDPVAAGWPPCLRMVAAIAVLTKDAGKLTMGQPLVILAPHAVEALVKQPPDRWLSNARMTHYQALLLDTDRVQFGPVVALNPATLLPLPEEGLQHNCLDILAEAHGTRPDLTDQPLPDADHTWYTDGSSLLQEGQRKAGAAVTTETEVIWAKALPAGTSAQRAELIALTQALKMAEGKKLNVYTDSRYAFATAHIHGEIYRRRGWLTSEGKEIKNKDEILALLKALFLPKRLSIIHCPGHQKGHSAEARGNRMADQAARKAAITETPDTSTLLIENSSPSGGSKRTADGSEFEPKKKRKV

SEQ ID NO: 1932 - protein, 2131 aa, synthetic construct
MKRTADGSEFESPKKKRKVDKKYSIGLDIGTNSVGWAVITDEYKVPSKKFKVLGNTDRHSIKKNLIGALLFDSGETAEATRLKRTARRRYTRRKNRICYLQEIFSNEMAKVDDSFFHRLEESFLVEEDKKHERHPIFGNIVDEVAYHEKYPTIYHLRKKLVDSTDKADLRLIYLALAHMIKFRGHFLIEGDLNPDNSDVDKLFIQLVQTYNQLFEENPINASGVDAKAILSARLSKSRKLENLIAQLPGEKKNGLFGNLIALSLGLTPNFKSNFDLAEDAKLQLSKDTYDDDLDNLLAQIGDQYADLFLAAKNLSDAILLSDILRVNTEITKAPLSASMIKRYDEHHQDLTLLKALVRQQLPEKYKEIFFDQSKNGYAGYIDGGASQEEFYKFIKPILEKMDGTEELLVKLKREDLLRKQRTFDNGSIPHQIHLGELHAILRRQEDFYPFLKDNREKIEKILTFRIPYYVGPLARGNSRFAWMTRKSEETITPWNFEEVVDKGASAQSFIERMTNFDKNLPNEKVLPKHSLLYEYFTVYNELTKVKYVTEGMRKPAFLSGEQKKAIVDLLFKTNRKVTVKQLKEDYFKKIECFDSVEISGVEDRFNASLGTYHDLLKIIKDKDFLDNEENEDILEDIVLTLTLFEDREMIEERLKTYAHLFDDKVMKQLKRRRYTGWGRLSRKLINGIRDKQSGKTILDFLKSDGFANRNFMQLIHDDSLTFKEDIQKAQVSGQGDSLHEHIANLAGSPAIKKGILQTVKVVDELVKVMGRHKPENIVIEMARENQTTQKGQKNSRERMKRIEEGIKELGSQILKEHPVENTQLQNEKLYLYYLQNGRDMYVDQELDINRLSDYDVDAIVPQSFLKDDSIDNKVLTRSDKNRGKSDNVPSEEVVKKMKNYWRQLLNAKLITQRKFDNLTKAERGGLSELDKAGFIKRQLVETRQITKHVAQILDSRMNTKYDENDKLIREVKVITLKSKLVSDFRKDFQFYKVREINNYHHAHDAYLNAVVGTALIKKYPKLESEFVYGDYKVYDVRKMIAKSEQEIGKATAKYFFYSNIMNFFKTEITLANGEIRKRPLIETNGETGEIVWDKGRDFATVRKVLSMPQVNIVKKTEVQTGGFSKESILPKRNSDKLIARKKDWDPKKYGGFDSPTVAYSVLVVAKVEKGKSKKLKSVKELLGITIMERSSFEKNPIDFLEAKGYKEVKKDLIIKLPKYSLFELENGRKRMLASAGELQKGNELALPSKYVNFLYLASHYEKLKGSPEDNEQKQLFVEQHKHYLDEIIEQISEFSKRVILADANLDKVLSAYNKHRDKPIREQAENIIHLFTLTNLGAPAAFKYFDTTIDRKRYTSTKEVLDATLIHQSITGLYETRIDLSQLGGDSGGSSGGSKRTADGSEFESPKKKRKVSGGSSGGSTLNIEDEYRLHETSKEPDVSLGSTWLSDFPQAWAETGGMGLAVRQAPLIIPLKATSTPVSIKQYPMSQEARLGIKPHIQRLLDQGILVPCQSPWNTPLLPVKKPGTNDYRPVQDLREVNKRVEDIHPTVPNPYNLLSGLPPSHQWYTVLDLKDAFFCLRLHPTSQPLFAFEWRDPEMGISGQLTWTRLPQGFKNSPTLFNEALHRDLADFRIQHPDLILLQYVDDLLLAATSELDCQQGTRALLQTLGNLGYRASAKKAQICQKQVKYLGYLLKEGQRWLTEARKETVMGQPTPKTPRQLREFLGKAGFCRLFIPGFAEMAAPLYPLTKPGTLFNWGPDQQKAYQEIKQALLTAPALGLPDLTKPFELFVDEKQGYAKGVLTQKLGPWRRPVAYLSKKLDPVAAGWPPCLRMVAAIAVLTKDAGKLTMGQPLVILAPHAVEALVKQPPDRWLSNARMTHYQALLLDTDRVQFGPVVALNPATLLPLPEEGLQHNCLDILAEAHGTRPDLTDQPLPDADHTWYTDGSSLLQEGQRKAGAAVTTETEVIWAKALPAGTSAQRAELIALTQALKMAEGKKLNVYTDSRYAFATAHIHGEIYRRRGWLTSEGKEIKNKDEILALLKALFLPKRLSIIHCPGHQKGHSAEARGNRMADQAARKAAITETPDTSTLLIENSSPSGGSKRTADGSEFESPKKKRKVGSGPAAKRVKLD

SEQ ID NO: 1933 - protein, 348 aa, Homo sapiens [sequence omitted]

SEQ ID NO: 1934 - RNA, 2768 nt, Homo sapiens
  source 1..2768: mol_type = mRNA
agagtcatccagctggagccctgagtggctgagctcaggccttcgcagcattcttgggtgggagcagccacgggtcagccacaagggccacagccatgaatggcacagaaggccctaacttctacgtgcccttctccaatgcgacgggtgtggtacgcagccccttcgagtacccacagtactacctggctgagccatggcagttctccatgctggccgcctacatgtttctgctgatcgtgctgggcttccccatcaacttcctcacgctctacgtcaccgtccagcacaagaagctgcgcacgcctctcaactacatcctgctcaacctagccgtggctgacctcttcatggtcctaggtggcttcaccagcaccctctacacctctctgcatggatacttcgtcttcgggcccacaggatgcaatttggagggcttctttgccaccctgggcggtgaaattgccctgtggtccttggtggtcctggccatcgagcggtacgtggtggtgtgtaagcccatgagcaacttccgcttcggggagaaccatgccatcatgggcgttgccttcacctgggtcatggcgctggcctgcgccgcacccccactcgccggctggtccaggtacatccccgagggcctgcagtgctcgtgtggaatcgactactacacgctcaagccggaggtcaacaacgagtcttttgtcatctacatgttcgtggtccacttcaccatccccatgattatcatctttttctgctatgggcagctcgtcttcaccgtcaaggaggccgctgcccagcagcaggagtcagccaccacacagaaggcagagaaggaggtcacccgcatggtcatcatcatggtcatcgctttcctgatctgctgggtgccctacgccagcgtggcattctacatcttcacccaccagggctccaacttcggtcccatcttcatgaccatcccagcgttctttgccaagagcgccgccatctacaaccctgtcatctatatcatgatgaacaagcagttccggaactgcatgctcaccaccatctgctgcggcaagaacccactgggtgacgatgaggcctctgctaccgtgtccaagacggagacgagccaggtggccccggcctaagacctgcctaggactctgtggccgactataggcgtctcccatcccctacaccttcccccagccacagccatcccaccaggagcagcgcctgtgcagaatgaacgaagtcacataggctccttaattttttttttttttttaagaaataattaatgaggctcctcactcacctgggacagcctgagaagggacatccaccaagacctactgatctggagtcccacgttccccaaggccagcgggatgtgtgcccctcctcctcccaactcatctttcaggaacacgaggattcttgctttctggaaaagtgtcccagcttagggataagtgtctagcacagaatggggcacacagtaggtgcttaataaatgctggatggatgcaggaaggaatggaggaatgaatgggaagggagaacatatctatcctctcagaccctcgcagcagcagcaactcatacttggctaatgatatggagcagttgtttttccctccctgggcctcactttcttctcctataaaatggaaatcccagatccctggtcctgccgacacgcagctactgagaagaccaaaagaggtgtgtgtgtgtctatgtgtgtgtttcagcactttgtaaatagcaagaagctgtacagattctagttaatgttgtgaataacatcaattaatgtaactagttaattactatgattatcacctcctgatagtgaacattttgagattgggcattcagatgatggggtttcacccaaccttggggcaggtttttaaaaattagctaggcatcaaggccagaccagggctgggggttgggctgtaggcagggacagtcacaggaatgcagaatgcagtcatcagacctgaaaaaacaacactgggggagggggacggtgaaggccaagttcccaatgagggtgagattgggcctggggtctcacccctagtgtggggccccaggtcccgtgcctccccttcccaatgtggcctatggagagacaggcctttctctcagcctctggaagccacctgctcttttgctctagcacctgggtcccagcatctagagcatggagcctctagaagccatgctcacccgcccacatttaattaacagctgagtccctgatgtcatccttatctcgaagagcttagaaacaaagagtgggaaattccactgggcctaccttccttggggatgttcatgggccccagtttccagtttcccttgccagacaagcccatcttcagcagttgctagtccattctccattctggagaatctgctccaaaaagctggccacatctctgaggtgtcagaattaagctgcctcagtaactgctcccccttctccatataagcaaagccagaagctctagctttacccagctctgcctggagactaaggcaaattgggccattaaaagctcagctcctatgttggtattaacggtggtgggttttgttgctttcacactctatccacaggatagattgaaactgccagcttccacctgatccctgaccctgggatggctggattgagcaatgagcagagccaagcagcacagagtcccctggggctagaggtggaggaggcagtcctgggaatgggaaaaacccca

SEQ ID NO: 1935 - RNA, 76 nt, synthetic construct
  source 1..76: mol_type = other RNA
gtttgagagctagaaatagcaagtttaaataaggctagtccgttatcaacttgaaaaagtgggaccgagtcggtcc

SEQ ID NO: 1936 - RNA, 30 nt, synthetic construct
  source 1..30: mol_type = other RNA
aacattgacgcgtctctacgtgggggcgcg

SEQ ID NO: 1937 - RNA, 55 nt, synthetic construct
  source 1..55: mol_type = other RNA
gggtcaggagccccccccctgaacccaggataaccctcaaagtcggggggcaacc

SEQ ID NO: 1938 - RNA, 60 nt, synthetic construct
  source 1..60: mol_type = other RNA
gtcagggtcaggagccccccccctgaacccaggataaccctcaaagtcggggggcaaccc

SEQ ID NO: 1939 - RNA, 56 nt, synthetic construct
  source 1..56: mol_type = other RNA
gggtcaggagccccccccctgaacccaggaaaaccctcaaagtcggggggcaaccc

SEQ ID NO: 1940 - RNA, 56 nt, synthetic construct
  source 1..56: mol_type = other RNA
gggtcaggagccccccccctgcacccaggaaaaccctcaaagtcggggggcaaccc

SEQ ID NO: 1941 - RNA, 56 nt, synthetic construct
  source 1..56: mol_type = other RNA
gggtcaggagccccccccctgcacccaggataaccctcaaagtcggggggcaaccc

SEQ ID NO: 1942 - RNA, 60 nt, synthetic construct
  source 1..60: mol_type = other RNA
gtcagggtcaggagccccccccctgaacccaggaaaaccctcaaagtcggggggcaaccc

SEQ ID NO: 1943 - RNA, 60 nt, synthetic construct
  source 1..60: mol_type = other RNA
gtcagggtcaggagccccccccctgcacccaggaaaaccctcaaagtcggggggcaaccc

SEQ ID NO: 1944 - RNA, 51 nt, synthetic construct
  source 1..51: mol_type = other RNA
gggtcaggagccccccccctgaacccaggataaccctcaaagtcggggggc

SEQ ID NO: 1945 - RNA, 13 nt, synthetic construct
  source 1..13: mol_type = other RNA
tggtggtggtggt

SEQ ID NO: 1946 - RNA, 20 nt, synthetic construct
  source 1..20: mol_type = other RNA
gggacagggcagggacaggg

SEQ ID NO: 1947 - RNA, 21 nt, synthetic construct
  source 1..21: mol_type = other RNA
gggtccgggtctgggtctggg

SEQ ID NO: 1948 - RNA, 19 nt, synthetic construct
  source 1..19: mol_type = other RNA
gggcagggtctgggctggg

SEQ ID NO: 1949 - RNA, 19 nt, synthetic construct
  source 1..19: mol_type = other RNA
gggctgggatgggaaaggg

SEQ ID NO: 1950 - RNA, 19 nt, synthetic construct
  source 1..19: mol_type = other RNA
gggctctgggtgggccggg

SEQ ID NO: 1951 - RNA, 18 nt, synthetic construct
  source 1..18: mol_type = other RNA
gggctgggctgggcaggg

SEQ ID NO: 1952 - RNA, 17 nt, synthetic construct
  source 1..17: mol_type = other RNA
gggtgggctgggaaggg

SEQ ID NO: 1953 - RNA, 17 nt, synthetic construct
  source 1..17: mol_type = other RNA
gggagggagggctaggg

SEQ ID NO: 1954 - RNA, 17 nt, synthetic construct
  source 1..17: mol_type = other RNA
gggcagggctgggaggg

SEQ ID NO: 1955 - RNA, 16 nt, synthetic construct
  source 1..16: mol_type = other RNA
gggtgggagggctggg

SEQ ID NO: 1956 - RNA, 43 nt, synthetic construct
  source 1..43: mol_type = other RNA
gcgtaacctccatccgagttgcaagagagggaaacgcagtctc

SEQ ID NO: 1957 - RNA, 160 nt, synthetic construct
  source 1..160: mol_type = other RNA
ggaattgcgggaaaggggtcaacagccgttcagtaccaagtctcaggggaaactttgagatggccttgcaaagggtatggtaataagctgacggacatggtcctaaccacgcagccaagtcctaagtcaacagatcttctgttgatatggatgcagttca

SEQ ID NO: 1958 - RNA, 42 nt, synthetic construct
  source 1..42: mol_type = other RNA
ttgacgcggttctatctagttacgcgttaaaccaactagaaa

SEQ ID NO: 1959 - RNA, 42 nt, synthetic construct
  source 1..42: mol_type = other RNA
ttgacgcggttctatctacttacgcgttaaaccaactagaaa

SEQ ID NO: 1960 - RNA, 44 nt, synthetic construct
  source 1..44: mol_type = other RNA
cgcgagtctaggggataacgcgttaaacttcctagaaggcggtt

SEQ ID NO: 1961 - RNA, 44 nt, synthetic construct
  source 1..44: mol_type = other RNA
cgcggatctagattgtaacgcgttaaaccatctagaaggcggtt

SEQ ID NO: 1962 - RNA, 44 nt, synthetic construct
  source 1..44: mol_type = other RNA
cgcgtcgctaccgcccggcgcgttaaacacactagaaggcggtt

SEQ ID NO: 1963 - RNA, 37 nt, synthetic construct; identical to SEQ ID NO: 1853
  source 1..37: mol_type = other RNA

SEQ ID NO: 1964 - RNA, 68 nt, synthetic construct
  source 1..68: mol_type = other RNA
ggccggcatggtcccagcctcctcgctggcgccggctgggcaacatgcttcggcatggcgaatgggac

SEQ ID NO: 1965 - RNA, 18 nt, synthetic construct
  source 1..18: mol_type = other RNA
ggtgggagacgtcccacc

SEQ ID NO: 1966 - RNA, 24 nt, synthetic construct
  source 1..24: mol_type = other RNA
gagcagcatggcgtcgctgctcac

SEQ ID NO: 1967 - RNA, 21 nt, synthetic construct
  source 1..21: mol_type = other RNA
ccatcagttgacaccctgagg

SEQ ID NO: 1968 - RNA, 28 nt, synthetic construct
  source 1..28: mol_type = other RNA
gcagacctaagtggtgacatatggtctg

SEQ ID NO: 1969 - RNA, 24 nt, synthetic construct
  source 1..24: mol_type = other RNA
catgcgattagaaataatcgcatg

SEQ ID NO: 1970 - RNA, 118 nt, synthetic construct
  source 1..118: mol_type = other RNA
tctgccatcaaagctgcgaccgtgctcagtctggtgggagacgtcccaccggccggcatggtcccagcctcctcgctggcgccggctgggcaacatgcttcggcatggcgaatgggac

SEQ ID NO: 1971 - RNA, 76 nt, synthetic construct
  source 1..76: mol_type = other RNA
gttttagagctatacgtagcaagttaaaataaggctagtccgttatcaactttacgaagtggcaccgagtcggtgc

SEQ ID NO: 1972 - RNA, 76 nt, synthetic construct
  source 1..76: mol_type = other RNA
gttttagagctatacgtagcaagttaaaataaggctagtccgttatcaactttacgaagtgggaccgagtcggtcc

SEQ ID NO: 1973 - RNA, 88 nt, synthetic construct
  source 1..88: mol_type = other RNA
gttttagagctagctcatgaaaatgagctagcaagttaaaataaggctagtccgttatcaacttgaaaaagtgggaccgagtcggtcc

SEQ ID NO: 1974 - RNA, 76 nt, synthetic construct; identical to SEQ ID NO: 1855
  source 1..76: mol_type = other RNA

SEQ ID NO: 1975 - RNA, 86 nt, synthetic construct
  source 1..86: mol_type = other RNA
gttttagagctatgctggaaacagcatagcaagttaaaataaggctagtccgttatcaacttgaaaaagtggcaccgagtcggtgc

SEQ ID NO: 1976 - RNA, 75 nt, synthetic construct
  source 1..75: mol_type = other RNA
  misc_feature 69..75: note = This region may encompass 3-7 nucleotides
ggccggcatggtcccagcctcctcgctggcgccggctgggcaacatgcttcggcatggcgaatgggacttttttt

SEQ ID NO: 1977 - RNA, 16 nt, synthetic construct
  source 1..16: mol_type = other RNA
tgggagacgtcccacc

SEQ ID NO: 1978 - RNA, 23 nt, synthetic construct
  source 1..23: mol_type = other RNA
  misc_feature 17..23: note = This region may encompass 3-7 nucleotides
tgggagacgtcccaccttttttt

SEQ ID NO: 1979 - RNA, 28 nt, synthetic construct
  source 1..28: mol_type = other RNA
  misc_feature 22..28: note = This region may encompass 3-7 nucleotides
ccatcagttgacaccctgaggttttttt

SEQ ID NO: 1980 - RNA, 31 nt, synthetic construct
  source 1..31: mol_type = other RNA
  misc_feature 25..31: note = This region may encompass 3-7 nucleotides
catgcgattagaaataatcgcatgttttttt

SEQ ID NO: 1981 - protein, 16 aa, synthetic construct
RQIKIWFQNRRMKWKK

SEQ ID NO: 1982 - protein, 9 aa, synthetic construct
RRRRRRRRR

SEQ ID NO: 1983 - protein, 8 aa, synthetic construct
RRRRRRRR

What is claimed is:

1. A prime editing guide RNA (PEgRNA) or a nucleic acid encoding the PEgRNA, wherein the PEgRNA comprises:
a. a spacer that is complementary to a search target sequence on a first strand of a RHO gene wherein the spacer comprises at its 3′ end SEQ ID NO: 1;
b. a gRNA core capable of binding to a Cas9 protein; and
c. an extension arm comprising:
i. an editing template that comprises a region of complementarity to an editing target sequence on a second strand of the RHO gene, and
ii. a primer binding site (PBS) that comprises at its 5′ end a sequence that is a reverse complement of nucleotides 10-14 of SEQ ID NO: 1,
wherein the first strand and second strand are complementary to each other, wherein the editing target sequence on the second strand comprises or is complementary to a portion of the RHO gene comprising a c.68 C→A substitution, and
wherein the editing template encodes or comprises a wild type amino acid sequence of a Rhodopsin protein at the c.68 C→A substitution site.

2. A prime editing guide RNA (PEgRNA), or a nucleic acid encoding the PEgRNA, wherein the PEgRNA comprises:
a. a spacer comprising at its 3′ end SEQ ID NO: 1;
b. a gRNA core capable of binding to a Cas9 protein; and
c. an extension arm comprising:
i. an editing template comprising at its 3′ end any one of SEQ ID NOs: 22-23, and
ii. a primer binding site (PBS) comprising at its 5′ end a sequence that is a reverse complement of nucleotides 10-14 of SEQ ID NO: 1.

3. The PEgRNA of any one of claims 1-2, wherein the spacer is from 17-22 nucleotides in length.

4. The PEgRNA of any one of claims 1-3, wherein the spacer comprises at its 3′ end any one of SEQ ID NOs: 2-6.

5. The PEgRNA of claim 4, wherein the spacer comprises at its 3′ end SEQ ID NO: 4.

6. The PEgRNA of any one of claims 1-5, wherein the editing template comprises SEQ ID NO: 22 at its 3′ end.

7. The PEgRNA of claim 6, wherein the editing template comprises at its 3′ end SEQ ID NO: 24, 26, 28, 30, 32, 34, 36, 38, 40, 42, 44, 46, 48, 50, 52, 54, 56, 58, 60, 62, 64, 66, 68, or 70.

8. The PEgRNA of any one of claims 1-5, wherein the editing template comprises SEQ ID NO: 23 at its 3′ end and encodes a GGG-to-GGA PAM silencing edit.

9. The PEgRNA of claim 8, wherein the editing template comprises at its 3′ end SEQ ID NO: 25, 27, 29, 31, 33, 35, 37, 39, 41, 43, 45, 47, 49, 51, 53, 55, 57, 59, 61, 63, 65, 67, 69, or 71.

10. The PEgRNA of any one of claims 1-9, wherein the editing template has a length of 40 nucleotides or less.

11. The PEgRNA of any one of claims 1-10, wherein the editing template has a length of 26 nucleotides or less.

12. The PEgRNA of claim 10 or claim 11, wherein the editing template is 20 to 26 nucleotides in length.

13. The PEgRNA of any one of claims 10-12, wherein the editing template is 20 to 22 nucleotides in length.

14. The PEgRNA of any one of claims 1-13, wherein the PBS comprises at its 5′ end a sequence corresponding to sequence number 7.

15. The PEgRNA of any one of claims 1-14, wherein the PBS comprises sequence number 7, 8, 9, 10, 11, 12, 13, 14, 15, 16, 17, 18, 19, 20, or 21.

16. The PEgRNA of any one of claims 1-15, wherein the PBS has a length of 15 nucleotides or less.

17. The PEgRNA of claim 16, wherein the PBS is 8 to 15 nucleotides in length.

18. The PEgRNA of claim 16 or claim 17, wherein the PBS is 11 to 15 nucleotides in length.

19. The PEgRNA of any one of claims 1-18, comprising a PEgRNA sequence selected from any one of SEQ ID NOs: 83-493.

20. A prime editing system comprising: (a) the PEgRNA or the nucleic acid of any one of claims 1-19, and (b) a ngRNA, or a nucleic acid encoding the ngRNA, wherein the ngRNA comprises:
(i) a spacer comprising at its 3′ end a sequence corresponding to nucleotides 4-20 of SEQ ID NO: 72, 73, 74, 75, 76, 77, 78, 79, 80, 81, or 82; and
(ii) an ngRNA core capable of binding a Cas9 protein.

21. The prime editing system of claim 20, wherein the spacer of the ngRNA comprises at its 3′ end SEQ ID NO: 72, 73, 74, 75, 76, 77, 78, 79, 80, 81, or 82.

22. A prime editing guide RNA (PEgRNA) or a nucleic acid encoding the PEgRNA, wherein the PEgRNA comprises:
a. a spacer that is complementary to a search target sequence on a first strand of a RHO gene wherein the spacer comprises at its 3′ end SEQ ID NO: 729;
b. a gRNA core capable of binding to a Cas9 protein; and
c. an extension arm comprising:
i. an editing template that comprises a region of complementarity to an editing target sequence on a second strand of the RHO gene, and
ii a primer binding site (PBS) that comprises at its 5′ end a sequence that is a reverse complement of nucleotides 10-14 of SEQ ID NO: 729,
wherein the first strand and second strand are complementary to each other,
wherein the editing target sequence on the second strand comprises or is complementary to a portion of the RHO gene comprising a c.68 C→A substitution, and
wherein the editing template encodes or comprises a wild type amino acid sequence of a Rhodopsin protein at the c.68 C→A substitution site.

23. A prime editing guide RNA (PEgRNA), or a nucleic acid encoding the PEgRNA, wherein the PEgRNA comprises:
a. a spacer comprising at its 3′ end SEQ ID NO: 729;
b. a gRNA core capable of binding, to a Cas9 protein, and
c. an extension arm comprising:
i. an editing template comprising at its 3′ end any one of SEQ ID NOs: 749-752, and
ii. a primer binding site (PBS) comprising at its 5′ end a sequence that is a reverse complement of nucleotides 10-14 of SEQ ID NO: 729.

24. The PEgRNA of any one of claims 22-23, wherein the spacer is from 17-22 nucleotides in length.

25. The PEgRNA of any one of claims 22-24, wherein the spacer comprises at its 3′ end any one of SEQ ID NOs: 730, 731, 76, 732, or 733.

26. The PEgRNA of claim 25, wherein the spacer comprises at its 3′ end SEQ IT NO: 76.

27. The PEgRNA of any one of claims 22-26, wherein the editing template comprises SEQ ID NO: 750 at its 3′ end.

28. The PEgRNA of claim 27, wherein the editing template comprises at its 3′ end SEQ ID NO: 754, 758, 762, 766, 770, 774, 778, 782, 786, 790, 794, 798, 802, 806, 810, 814, 818, 822, 826, 830, 834, 838, 842, or 846.

29. The PEgRNA of any one of claims 22-26, wherein the editing template comprises SEQ ID NO: 749 at its 3′ end and encodes a TGG-to-TTG PAM silencing edit.

30. The PEgRNA of claim 29, wherein the editing template comprises at its 3′ end SEQ ID NO: 753, 757, 761, 765, 769, 773, 777, 781, 785, 789, 793, 797, 801, 805, 809, 813, 817, 821, 825, 829, 833, 837, 841, or 845.

31. The PEgRNA of any one of claims 22-26, wherein the editing template comprises SEQ ID NO: 751 at its 3′ end and encodes a TGG-to-TCG PAM silencing edit.

32. The PEgRNA of claim 31, wherein the editing template comprises at its 3′ end SEQ ID NO: 755, 759, 763, 767, 771, 775, 779, 783, 787, 791, 795, 799, 803, 807, 811, 815, 819, 823, 827, 831, 835, 839, 843, or 847.

33. The PEgRNA of any one of claims 22-26, wherein the editing template comprises SEQ ID NO: 752 at its 3′ end and encodes a TOG-to-TAG PAM silencing edit.

34. The PEgRNA of claim 33, wherein the editing template comprises at its 3′ end SEQ ID NO: 756, 760, 764, 768, 772, 776, 780, 784, 788, 792, 796, 800, 804, 808, 812, 816, 820, 824, 828, 832, 836, 840, 844 or 848.

35. The PEgRNA of any one of claims 22-34, wherein the editing template has a length of 40 nucleotides or less.

36. The PEgRNA of any one of claims 22-35, wherein the editing template has a length of 26 nucleotides or less.

37. The PEgRNA of claim 35 or claim 36, wherein the editing template is 20 to 26 nucleotides in length.

38. The PEgRNA of any one of claims 35-37, wherein the editing template is 20 to 22 nucleotides in length.

39. The PEgRNA of any one of claims 22-38, wherein the PBS comprises at its 5′ end a sequence corresponding to sequence number 734.

40. The PEgRNA of any one of claims 22-39, wherein the PBS comprises sequence number 735, 736, 737, 738, 739, 740, 741, 742, 743, 744, 745, 746, 747, or 748.

41. The PEgRNA of any one of claims 22-40, wherein the PBS has a length of 16 nucleotides or less.

42. The PEgRNA of claim 41, wherein the PBS is 8 to 16 nucleotides in length.

43. The PEgRNA of any one of claims 22-42, comprising a PEgRNA sequence selected from any one of SEQ ID NOs: 863-1156.

44. A prime editing system comprising: (a) the PEgRNA or the nucleic acid of any one of claims 22-43, and (b) a ngRNA, or a nucleic acid encoding the ngRNA, wherein the ngRNA comprises:
(i) a spacer comprising at its 3′ end a sequence corresponding to nucleotides 4-20 of SEQ ID NO: 849, 850, 851, 520, 852, 853, 854, 4, 855, 856, 857, 858, 859, 860, 861, or 862; and
(ii) an ngRNA core capable of binding a Cas9 protein.

45. The prime editing system of claim 44, wherein the spacer of the ngRNA comprises at its 3′ end SEQ ID NO: 849, 850, 851, 520, 852, 853, 854, 4, 855, 856, 857, 858, 859, 860, 861, or 862.

46. A prime editing guide RNA (PEgRNA) or a nucleic acid encoding the PEgRNA, wherein the PEgRNA comprises:
a. a spacer that is complementary to a search target sequence on a first strand of a RHO gene wherein the spacer comprises at its 3′ end SEQ ID NO: 517; and
b. a gRNA core capable of binding to a Cas9 protein;
c. an extension arm comprising:
i. an editing template that comprises a region of complementarity to an editing target sequence on a second strand of the RHO gene, and
ii. a primer binding site (PBS) that comprises at its 5′ end a sequence that is a reverse complement of nucleotides 10-14 of SEQ ID NO: 517,
wherein the first strand and second strand are complementary to each other,
wherein the editing target sequence on the second strand comprises or is complementary to a portion of the RHO gene comprising a c.68 C→A substitution, and
wherein the editing template encodes or comprises a wild type amino acid sequence of a Rhodopsin protein at the c.68 C→A substitution site.

47. A prime editing guide RNA (PEgRNA), or a nucleic acid encoding the PEgRNA wherein the PEgRNA comprises:
a. a spacer comprising at its 3′ end SEQ TD NO: 517;
b. a gRNA core capable of binding to a Cas9 protein, and
c. an extension arm comprising:
i. an editing template comprising at its 3′ end any one of SEQ ID NOs: 538, 539, 540, 541, or 542, and
ii. a primer binding site (PBS) comprising at its 5′ end a sequence that is a reverse complement of nucleotides 10-14 of SEQ ID NO: 517.

48. The PEgRNA of any one of claims 46-47, wherein the spacer is from 17-22 nucleotides in length.

49. The PEgRNA of any one of claims 46-48, wherein the spacer comprises at its 3′ end any one of SEQ ID NOs: 518-522.

50. The PEgRNA of claim 49, wherein the spacer comprises at its 3′ end SEQ ID NO: 520.

51. The PEgRNA of any one of claims 46-50, wherein the editing template comprises SEQ ID NO: 538 at its 3′ end.

52. The PEgRNA of claim 51, wherein the editing template comprises at its 3′ end SEQ ID NO: 543, 548, 553, 558, 563, 568, 573, 578, 583, 588, 593, 598, 603, 608, 613, 618, 623, 628, 633, 638, 643, 648, 653, 658, 663, 668, 673, 678, 683, or 688.

53. The PEgRNA of any one of claims 46-50, wherein the editing template comprises SEQ TD NO: 541 at its 3′ end and encodes a TGG-to-GGC PAM silencing edit.

54. The PEgRNA of claim 53, wherein the editing template comprises at its 3′ end SEQ ID NO: 546, 551, 556, 561, 566, 571, 576, 581, 586, 591, 596, 601, 606, 611, 616, 621, 626, 631, 636, 641, 646, 651, 656, 661, 666, 671, 676, 681, 686, or 691.

55. The PEgRNA of any one of claims 46-50, wherein the editing template comprises SEQ ID NO: 540 at its 3′ end and encodes a TGG-to-GGT PAM silencing edit.

56. The PEgRNA of claim 55, wherein the editing template comprises at its 3′ end SEQ ID NO: 545, 550, 555, 560, 565, 570, 575, 580, 585, 590, 595, 600, 605, 610, 615, 620, 625, 630, 635, 640, 645, 650, 655, 660, 665, 670, 675, 680, 685, or 690.

57. The PEgRNA of any one of claims 46-50, wherein the editing template comprises SEQ ID NO: 542 at its 3′ end and encodes a TGG-to-GGA PAM silencing edit.

58. The PEgRNA of claim 57, wherein the editing template comprises at its 3′ end SEQ ID NO: 547, 552, 557, 562, 567, 572, 577, 582, 587, 592, 597, 602, 607, 612, 617, 622, 627, 632, 637, 642, 647, 652, 657, 662, 667, 672, 677, 682, 687, or 692.

59. The PEgRNA of any one of claims 46-50, wherein the editing template comprises SEQ ID NO: 539 at its 3′ end and encodes a TGG-to-GGA PAM silencing edit.

60. The PEgRNA of claim 59, wherein the editing template comprises at its 3′ end SEQ ID NO: 544, 549, 554, 559, 564, 569, 574, 579, 584, 589, 594, 599, 604, 609, 614, 619, 624, 629, 634, 639, 644, 649, 654, 659, 664, 669, 674, 679, 684, or 689.

61. The PEgRNA of any one of claims 46-60, wherein the editing template has a length of 40 nucleotides or less.

62. The PEgRNA of any one of claims 46-61, wherein the editing template has a length of 16 nucleotides or less.

63. The PEgRNA of claim 61 or claim 62, wherein the editing template is 10 to 16 nucleotides in length.

64. The PEgRNA of any one of claims 46-63, wherein the PBS comprises at its 5′ end a sequence corresponding to sequence number 523.

65. The PEgRNA of any one of claims 46-64, wherein the PBS comprises sequence number 523, 524, 525, 526, 527, 528, 529, 530, 531, 532, 533, 534, 535, 536, or 537.

66. The PEgRNA of any one of claims 46-65, wherein the PBS has a length of 14 nucleotides or less.

67. The PEgRNA of claim 66, wherein the PBS is 8 to 14 nucleotides in length.

68. The PEgRNA of any one of claims 46-67, comprising a PEgRNA sequence selected from any one of SEQ ID NOs: 697-728.

69. A prime editing system comprising: (a) the PEgRNA or the nucleic acid of any one of claims 46-68, and (b) a ngRNA, or a nucleic acid encoding the ngRNA, wherein the ngRNA comprises:
(i) a spacer comprising at its 3′ end a sequence corresponding to nucleotides 4-20 of SEQ ID NO: 72, 73, 74, 693, 694, 75, 76, 77, 695, 78, 696, 79, or 80; and
(ii) an ngRNA core capable of binding a Cas9 protein.

70. The prime editing system of claim 69, wherein the spacer of the ng RNA comprises at its 3′ end SEQ ID NO: 72, 73, 74, 693, 694, 75, 76, 77, 695, 78, 696, 79, or 80.

71. A prime editing guide RNA (PEgRNA) or a nucleic acid encoding the PEgRNA, wherein the PEgRNA comprises:
a. a spacer that is complementary to a search target sequence on a first strand of a RHO gene wherein the spacer comprises at its 3′ end SEQ ID NO: 1187;
b. a gRNA core capable of binding to a Cas9 protein; and
c. an extension arm comprising:
i. an editing template that comprises a region of complementarity to an editing target sequence on a second strand of the RHO gene, and
ii. a primer binding site that comprises at its 5′ end a sequence that is a reverse complement of nucleotides 10-14 of SEQ ID NO: 1187,
wherein the first strand and second strand are complementary to each other,
wherein the editing target sequence on the second strand comprises or is complementary to a portion of the RHO gene comprising a c.68 C→A substitution, and
wherein the editing template encodes or comprises a wild type amino acid sequence of a Rhodopsin protein at the c.68 C→A substitution site.

72. A prime editing guide RNA (PEgRNA), or a nucleic acid encoding the PEgRNA, wherein the PEgRNA comprises:
a. a spacer comprising at its 3′ end SEQ ID NO: 1187;
b. a gRNA core capable of binding to a Cas9 protein, and
c. an extension arm comprising:
i. an editing template comprising at its 3′ end any one of SEQ ID NOs: 1207, 1208, 1209, or 1210, and
ii. a primer binding site (PBS) comprising at its 5′ end a sequence that is a reverse complement of nucleotides 10-14 of SEQ ID NO: 1187.

73. The PEgRNA of any one of claims 71-72, wherein the spacer is from 17-22 nucleotides in length.

74. The PEgRNA of any one of claims 71-73, wherein the spacer comprises at its 3′ end any one of SEQ ID NOs: 1188, 1189, 75, 1190, or 1191.

75. The PEgRNA of claim 74, wherein the spacer comprises at its 3′ end SEQ ID NO: 75.

76. The PEgRNA of any one of claims 71-75, wherein the editing template comprises SEQ ID NO: 1208 at its 3′ end.

77. The PEgRNA of claim 76, wherein the editing template comprises at its 3′ end SEQ ID NO: 1212, 1216, 1220, 1224, 1228, 1232, 1236, 1240, 1244, 1248, 1252, 1256, 1260, 1264, 1268, 1272, 1276, or 1280.

78. The PEgRNA of any one of claims 71-75, wherein the editing template comprises SEQ TD NO: 1207 at its 3′ end and encodes a CGO-to-CTG PAM silencing edit.

79. The PEgRNA of claim 78, wherein the editing template comprises at its 3′ end SEQ ID NO: 1211, 1215, 1219, 1223, 1227, 1231, 1235, 1239, 1243, 1247, 1251, 1255, 1259, 1263, 1267, 1271, 1275, or 1279.

80. The PEgRNA of any one of claims 71-75, wherein the editing template comprises SEQ ID NO. 1209 at its 3′ end and encodes a CGG-to-CCG PAM silencing edit.

81. The PEgRNA of claim 80, wherein the editing template comprises at its 3′ end SEQ ID NO: 1213, 1217, 1221, 1225, 1229, 1233, 1237, 1241, 1245, 1249, 1253, 1257, 1261, 1265, 1269, 1273, 1277 or 1281.

82. The PEgRNA of any one of claims 71-75, wherein the editing template comprises SEQ ID NO: 1210 at its 3′ end and encodes a CGG-to-CAG PAM silencing edit.

83. The PEgRNA of claim 82, wherein the editing template comprises at its 3′ end SEQ ID NO: 1214, 1218, 1222, 1226, 1230, 1234, 1238, 1242, 1246, 1250, 1254, 1258, 1262, 1266, 1270, 1274, 1278, or 1282.

84. The PEgRNA of any one of claims 71-83, wherein the editing template has a length of 40 nucleotides or less.

85. The PEgRNA of any one of claims 71-84, wherein the editing template has a length of 32 nucleotides or less.

86. The PEgRNA of claim 84 or claim 85, wherein the editing template is 26 to 32 nucleotides in length.

87. The PEgRNA of any one of claims 71-86, wherein the PBS comprises at its 5′ end a sequence corresponding to sequence number 1192.

88. The PEgRNA of any one of claims 71-87, wherein the PBS comprises sequence number 1192, 1193, 1194, 1195, 1196, 1197, 1198, 1199, 1200, 1201, 1202, 1203, 1204, 1205, or 1206.

89. The PEgRNA of any one of claims 71-88, wherein the PBS has a length of 14 nucleotides or less.

90. The PEgRNA of claim 89, wherein the PBS is 8 to 14 nucleotides in length.

91. The PEgRNA of any one of claims 71-90, comprising a PEgRNA sequence selected from any one of SEQ ID NOs: 1286-1329.

92. A prime editing system comprising: (a) the PEgRNA or the nucleic acid of any one of claims 71-91, and (b) a ngRNA, or a nucleic acid encoding the ngRNA, wherein the ngRNA comprises:
(i) a spacer comprising at its 3′ end a sequence corresponding to nucleotides 4-20 of SEQ ID NO: 849, 850, 851, 520, 852, 853, 854, 1283, 862, 1284, 1285, 4, 855, 856, 857, or 858; and
(ii) an ngRNA core capable of binding a Cas9 protein.

93. The prime editing system of claim 92, wherein the spacer of the ngRNA comprises at its 3′ end SEQ ID NO: 849, 850, 851, 520, 852, 853, 854, 1283, 862, 1284, 1285, 4, 855, 856, 857, or 858.

94. A prime editing guide RNA (PEgRNA) or a nucleic acid encoding the PEgRNA, wherein the PEgRNA comprises:
a. a spacer that is complementary to a search target sequence on a first strand of a R110 gene wherein the spacer comprises at its 3′ end SEQ ID NO: 1330;
b, a gRNA core capable of binding to a Cas9 protein; and
c. an extension arm comprising:
i. an editing template that comprises a region of complementarity to an editing target sequence on a second strand of the RHO gene, and
ii. a primer binding site (PBS) that comprises at its 5′ end a sequence that is a reverse complement of nucleotides 10-14 of SEQ ID NO: 1330,
wherein the first strand and second strand are complementary to each other,
wherein the editing target sequence on the second strand comprises or is complementary to a portion of the RHO gene comprising a c.68 C→A substitution, and
wherein the editing template encodes or comprises a wild type amino acid sequence of a Rhodopsin protein at the c.68 C→A substitution site.

95. A prime editing guide RNA (PEgRNA), or a nucleic acid encoding the PEgRNA, wherein the PEgRNA comprises:
a. a spacer comprising at its 3′ end SEQ ID NO: 1330;
b. a gRNA core capable of binding to a Cas9 protein; and
c. an extension arm comprising:
i. an editing template comprising at its 3′ end SEQ ID NO: 1350, and
ii. a primer binding site (PBS) comprising at its 5′ end a sequence that is a reverse complement of nucleotides 10-14 of SEQ ID NO: 1330.

96. The PEgRNA of any one of claims 94-95, wherein the spacer is from 17-22 nucleotides in length.

97. The PEgRNA of any one of claims 94-96, wherein the spacer comprises at its 3′ end any one of SEQ ID NOs: 1331, 1332, 855, 1333, or 1334.

98. The PEgRNA of claim 97, wherein the spacer comprises at its 3′ end SEQ ID NO: 855.

99. The PEgRNA of any one of claims 94-98, wherein the editing template comprises SEQ ID NO: 1350 at its 3′ end.

100. The PEgRNA of any one of claims 94-99, wherein the editing template has a length of 40 nucleotides or less.

101. The PEgRNA of any one of claims 94-100, wherein the editing template has a length of 27 nucleotides or less.

102. The PEgRNA of claim 100 or claim 101, wherein the editing template is 21 to 27 nucleotides in length.

103. The PEgRNA of claim 102, wherein the editing template comprises at its 3′ end any one of SEQ ID NOs: 1351-1373.

104. The PEgRNA of any one of claims 94-103, wherein the PBS comprises at its 5′ end a sequence corresponding to sequence number 1335.

105. The PEgRNA of any one of claims 94-104, wherein the PBS comprises sequence number 1335, 1336, 1337, 1338, 1339, 1340, 1341, 1342, 1343, 1344, 1345, 1346, 1347, 1348, or 1349.

106. The PEgRNA of any one of claims 94-105, wherein the PBS has a length of 14 nucleotides or less.

107. The PEgRNA of claim 106, wherein the PBS is 8 to 14 nucleotides in length.

108. The PEgRNA of any one of claims 94-107, comprising a PEgRNA sequence selected from any one of SEQ ID NOs: 1374-1435.

109. A prime editing system comprising: (a) the PEgRNA or the nucleic acid of any one of claims 94-108, and (b) a ngRNA, or a nucleic acid encoding the ngRNA, wherein the ngRNA comprises:
(i) a spacer comprising at its 3′ end a sequence corresponding to nucleotides 4-20 of SEQ ID NO: 72, 73, 74, 75, 76, 77, 78, 79, or 80; and
(ii) an ngRNA core capable of binding a Cas9 protein.

110. The prime editing system of claim 109, wherein the spacer of the ngRNA comprises at its 3′ end SEQ ID NO: 72, 73, 74, 75, 76, 77, 78, 79, or 80.

111. A prime editing guide RNA (PEgRNA) or a nucleic acid encoding the PEgRNA, wherein the PEgRNA comprises:
a. a spacer that is complementary to a search target sequence on a first strand of a RHO gene wherein the spacer comprises at its 3′ end SEQ TD NO: 1436;
b. a gRNA core capable of binding to a Cas9 protein; and
c. an extension arm comprising:
i. an editing template that comprises a region of complementarity to an editing target sequence on a second strand of the RHO gene, and
ii. a primer binding site (PBS) that comprises at its 5′ end a sequence that is a reverse complement of nucleotides 10-14 of SEQ ID NO: 1436,
wherein the first strand and second strand are complementary to each other,
wherein the editing target sequence on the second strand comprises or is complementary to a portion of the RHO gene comprising a c.68 C→A substitution, and
wherein the editing template encodes or comprises a wild type amino acid sequence of a Rhodopsin protein at the c.68 C→A substitution site.

112. A prime editing guide RNA (PEgRNA), or a nucleic acid encoding the PEgRNA, wherein the PEgRNA comprises:
a. a spacer comprising at its 3′ end SEQ ID NO: 1436;
b. a gRNA core capable of binding to a Cas9 protein; and
c. an extension arm comprising:
i. an editing template comprising at its 3′ end SEQ TD NO: 1456, and
ii. a primer binding site (PBS) comprising at its 5′ end a sequence that is a reverse complement of nucleotides 10-14 of SEQ ID NO: 1436.

113. The PEgRNA of any one of claims 111-112, wherein the spacer is from 17-22 nucleotides in length.

114. The PEgRNA of any one of claims 111-113, wherein the spacer comprises at its 3′ end any one of SEQ ID NOs: 1437, 1438, 78, 1439, or 1440.

115. The PEgRNA of claim 114, wherein the spacer comprises at its 3′ end SEQ ID NO: 78.

116. The PEgRNA of any one of claims 111-115, wherein the editing template comprises SEQ ID NO: 1456 at its 3′ end.

117. The PEgRNA of claim 116, wherein the editing template comprises at its 3′ end SEQ ID NO: 1457, 1458, 1459, 1460, 1461, 1462, 1463, 1464, 1465, 1466, 1467, 1468, 1469, 1470, 1471, 1472, 1473, 1474, or 1475.

118. The PEgRNA of any one of claims 111-117, wherein the editing template has a length of 40 nucleotides or less.

119. The PEgRNA of any one of claims 111-118, wherein the editing template has a length of 31 nucleotides or less.

120. The PEgRNA of claim 118 or claim 119, wherein the editing template is 25 to 31 nucleotides in length.

121. The PEgRNA of any one of claims 111-120, wherein the PBS comprises at its 5′ end a sequence corresponding to sequence number 1441.

122. The PEgRNA of any one of claims 111-121, wherein the PBS comprises sequence number 1441, 1442, 1443, 1444, 1445, 1446, 1447, 1448, 1449, 1450, 1451, 1452, 1453, 1454, or 1455.

123. The PEgRNA of any one of claims 111-122, wherein the PBS has a length of 14 nucleotides or less.

124. The PEgRNA of claim 123, wherein the PBS is 8 to 14 nucleotides in length.

125. The PEgRNA of any one of claims 111-124, comprising a PEgRNA sequence selected from any one of SEQ ID NOs: 1476-1515.

126. A prime editing system comprising: (a) the PEgRNA or the nucleic acid of any one of claims 111-125, and (b) a ngRNA, or a nucleic acid encoding the ngRNA, wherein the ngRNA comprises:
(i) a spacer comprising at its 3′ end a sequence corresponding to nucleotides 4-20 of SEQ ID NO: 849, 850, 851, 520, 852, 853, 854, 4, 855, 856, 857, or 858; and
(ii) an ngRNA core capable of binding a Cas9 protein.

127. The prime editing system of claim 126, wherein the spacer of the ngRNA comprises at its 3′ end SEQ ID NO: 849, 850, 851, 520, 852, 853, 854, 4, 855, 856, 857, or 858.

128. A prime editing guide RNA (PEgRNA) or a nucleic acid encoding the PEgRNA, wherein the PEgRNA comprises:
a. a spacer that is complementary to a search target sequence on a first strand of a RHO gene wherein the spacer comprises at its 3′ end SEQ ID NO: 1516; and
b. a gRNA core capable of binding to a Cas9 protein;
c. an extension arm comprising:
i. an editing template that comprises a region of complementarity to an editing target sequence on a second strand of the RHO gene, and
ii. a primer binding site (PBS) that comprises at its 5′ end a sequence that is a reverse complement of nucleotides 10-14 of SEQ ID NO: 1516,
wherein the first strand and second strand are complementary to each other,
wherein the editing target sequence on the second strand comprises or is complementary to a portion of the RHO gene comprising a c.68 C→A substitution, and
wherein the editing template encodes or comprises a wild type amino acid sequence of a Rhodopsin protein at the c.68 C→A substitution site.

129. A prime editing guide RNA (PEgRNA), or a nucleic acid encoding the PEgRNA, wherein the PEgRNA comprises:
a. a spacer comprising at its 3′ end SEQ ID NO: 1516;
b. a gRNA core capable of binding to a Cas9 protein; and
c. an extension arm comprising:
i. an editing template comprising at its 3′ end any one of SEQ ID NOs: 1536-1541, and
ii. a primer binding site (PBS) comprising at its 5′ end a sequence that is a reverse complement of nucleotides 10-14 of SEQ ID NO: 1516.

130. The PEgRNA of any one of claims 128-129, wherein the spacer is from 17-22 nucleotides in length.

131. The PEgRNA of any one of claims 128-130, wherein the spacer comprises at its 3′ end any one of SEQ ID NOs: 1517, 1518, 850, 1519, or 1520.

132. The PEgRNA of claim 131, wherein the spacer comprises at its 3′ end SEQ ID NO: 850.

133. The PEgRNA of any one of claims 128-132, wherein the editing template comprises SEQ ID NO: 1536 at its 3′ end.

134. The PEgRNA of claim 133, wherein the editing template comprises at its 3′ end SEQ ID NO: 1542, 1548, 1554, 1560, 1566, 1572, 1578, 1584, 1590, 1596, 1602 or 1608.

135. The PEgRNA of any one of claims 128-132, wherein the editing template comprises SEQ ID NO: 1540 at its 3′ end and encodes a AGG-to-AAA PAM silencing edit.

136. The PEgRNA of claim 135, wherein the editing template comprises at its 3′ end SEQ TD NO: 1546, 1552, 1558, 1564, 1570, 1576, 1582, 1588, 1594, 1600, 1606, or 1612.

137. The PEgRNA of any one of claims 128-132, wherein the editing template comprises SEQ ID NO: 1537 at its 3′ end and encodes a AGG-to-AAG PAM silencing edit.

138. The PEgRNA of claim 137, wherein the editing template comprises at its 3′ end SEQ ID NO: 1543, 1549, 1555, 1561, 1567, 1573, 1579, 1585, 1591, 1597, 1603, or 1609.

139. The PEgRNA of any one of claims 128-132, wherein the editing template comprises SEQ ID NO: 1538 at its 3′ end and encodes a AGG-to-AAG PAM silencing edit.

140. The PEgRNA of claim 139, wherein the editing template comprises at its 3′ end SEQ TD NO: 1544, 1550, 1556, 1562, 1568, 1574, 1580, 1586, 1592, 1598, 1604, or 1610.

141. The PEgRNA of any one of claims 128-132, wherein the editing template comprises SEQ ID NO: 1539 at its 3′ end and encodes a AGG-to-AGA PAM silencing edit.

142. The PEgRNA of claim 141, wherein the editing template comprises at its 3′ end SEQ ID NO: 1545, 1551, 1557, 1563, 1569, 1575, 1581, 1587, 1593, 1599, 1605, or 1611.

143. The PEgRNA of any one of claims 128-132, wherein the editing template comprises SEQ ID NO: 1541 at its 3′ end and encodes a AGG-to-AAA PAM silencing edit.

144. The PEgRNA of claim 143, wherein the editing template comprises at its 3′ end SEQ ID NO: 1547, 1553, 1559, 1565, 1571, 1577, 1583, 1589, 1595, 1601, 1607, or 1613.

145. The PEgRNA of any one of claims 129-144, wherein the editing template has a length of 40 nucleotides or less.

146. The PEgRNA of any one of claims 129-145, wherein the editing template has a length of 38 nucleotides or less.

147. The PEgRNA of claim 145 or claim 146, wherein the editing template is 32 to 38 nucleotides in length.

148. The PEgRNA of any one of claims 128-147, wherein the PBS comprises at its 5′ end a sequence corresponding to sequence number 1521.

149. The PEgRNA of any one of claims 128-148, wherein the PBS comprises sequence number 1521, 1522, 1523, 1524, 1525, 1526, 1527, 1528, 1529, 1530, 1531, 1532, 1533, 1534, or 1535.

150. The PEgRNA of any one of claims 129-149, wherein the PBS has a length of 14 nucleotides or less.

151. The PEgRNA of claim 150, wherein the PBS is 8 to 14 nucleotides in length.

152. The PEgRNA of any one of claims 128-150, comprising a PEgRNA sequence selected from any one of SEQ ID NOs: 1617-1646.

153. A prime editing system comprising: (a) the PEgRNA or the nucleic acid of any one of claims 128-152, and (b) a ngRNA, or a nucleic acid encoding the ngRNA, wherein the ngRNA comprises:
(i) a spacer comprising at its 3′ end a sequence corresponding to nucleotides 4-20 of SEQ ID NO: 72, 73, 74, 82, 1614, 1615, 1616, 75, 76, 77, or 78; and
(ii) an ngRNA core capable of binding a Cas9 protein.

154. The prime editing system of claim 153, wherein the spacer of the ngRNA comprises at its 3′ end SEQ ID NO: 72, 73, 74, 82, 1614, 1615, 1616, 75, 76, 77, or 78.

155. The PEgRNA of any one of claims 1-19, 22-43, 46-68, 71-91, 94-108, 111-125, or 128-152, comprising from 5′ to 3′, the spacer, the gRNA core, the RTT, and the PBS.

156. The PEgRNA of claim 155, wherein the spacer, the gRNA core, the RTT, and the PBS form a contiguous sequence in a single molecule.

157. The PEgRNA of any one of claims 1-19, 22-43, 46-68, 71-91, 94-108, 111-125, 128-152, or 155-156, further comprising 3′ mN*mN*mN*N and 5′ mN*mN*mN* modifications, where m indicates that the nucleotide contains a 2′-O-Me modification and a * indicates the presence of a phosphorothioate bond.

158. The PEgRNA of any one of claims 1-19, 22-43, 46-68, 71-91, 94-108, 111-125, 128-152, or 155-157, further comprising 3′ mT*mT*mT*T and 5′ mN*mN*mN* modifications, where m indicates that the nucleotide contains a 2′-O-Me modification, a * indicates the presence of a phosphorothioate bond, and a T indicates the presence of an additional uridine nucleotide.

159. The prime editing system of any one of claims 20, 44, 69, 92, 109, 126, or 153, further comprising: (c) a prime editor comprising a Cas9 nickase having a nuclease inactivating mutation in the HNH domain, or a nucleic acid encoding the Cas9 nickase, and a reverse transcriptase, or a nucleic acid encoding the reverse transcriptase.

160. The prime editing system of claim 159, wherein the prime editor is a fusion protein.

161. The prime editing system of any one of claims 20, 44, 69, 92, 109, 126, or 153, further comprising: (c) an N-terminal extein comprising an N-terminal fragment of a prime editor fusion protein and an N-intein or a polynucleotide encoding the N-terminal extein; and (d) a C-terminal extein comprising a C-terminal fragment of the prime editor fusion protein and a C-intein, or a polynucleotide encoding the C-terminal extein; wherein the N-intein and the C-intein of the N-terminal and C-terminal exteins are capable of self-excision to join the N-terminal fragment and the C-terminal fragment to form the prime editor fusion protein, and wherein the prime editor fusion protein comprises a Cas9 nickase and a reverse transcriptase (RT) domain.

162. A prime editing system comprising: (a) the PEgRNA of any one of claims 1-19, 22-43, 46-68, 71-91, 94-108, 111-125, 128-152 or 155-157, or the nucleotide encoding the PEgRNA; and (b) a prime editor comprising a Cas9 nickase having a nuclease inactivating mutation in the HNH domain, or a nucleic acid encoding the Cas9 nickase, and a reverse transcriptase, or a nucleic acid encoding the reverse transcriptase.

163. A prime editing system comprising: (a) the PEgRNA of any one of claims 1-19, 22-43, 46-68, 71-91, 94-108, 111-125, 128-152 or 155-157, or the nucleotide encoding the PEgRNA; (b) an N-terminal extein comprising an N-terminal fragment of a prime editor fusion protein and an N-intein or a polynucleotide encoding the N-terminal extein; and (c) a C-terminal extein comprising a C-terminal fragment of the prime editor fusion protein and a C-intein, or a polynucleotide encoding the C-terminal extein; wherein the N-intein and the C-intein of the N-terminal and C-terminal exteins are capable of self-excision to join the N-terminal fragment and the C-terminal fragment to form the prime editor fusion protein, and wherein the prime editor fusion protein comprises a Cas9 nickase and a reverse transcriptase (RT) domain.

164. The prime editing system of any one of claims 159-163, wherein the Cas9 nickase comprises an amino acid sequence having at least 80%, 85% 90%, 95%, 96%, 97%, 98%, 99%, or 100% identity to SEQ ID NO: 1867 or SEQ ID NO: 1868.

165. The prime editing system of any one of claims 159-163, wherein the reverse transcriptase comprises an amino acid sequence having at least 80%, 85%, 90%, 95%, 96%, 97%, 98%, 99%, or 100% identity to SEQ ID NO: 1864.

166. The prime editing system of claim 164 or 165, wherein the sequence identities are determined by Needleman-Wunsch alignment of two protein sequences with Gap Costs set to Existence: 11 Extension: 1 where percent identity is calculated by dividing the number of identities by the length of the alignment.

167. A population of viral particles collectively comprising the one or more nucleic acids encoding the prime editing system of any one of claims 20, 44, 69, 92, 109, 126, 153 or 159-166.

168. The population of viral particle of claim 167, wherein the viral particles are AAV particles.

169. An LNP comprising the prime editing system of any one of claims 20, 44, 69, 92, 109, 126, 153 or 159-166.

170. The LNP of claim 169, comprising the PEgRNA, the nucleic acid encoding the Cas9 nickase, and the nucleic acid encoding the reverse transcriptase.

171. The LNP of claim 170, wherein the nucleic acid encoding the Cas9 nickase and the nucleic acid encoding the reverse transcriptase are mRNA.

172. The LNP of claim 169 or 170, wherein the nucleic acid encoding the Cas9 nickase and the nucleic acid encoding the reverse transcriptase are the same molecule.

173. A method of correcting or editing a RHO gene, the method comprising contacting the RHO gene with: (a) the PEgRNA of any one of claims 1-19, 22-43, 46-68, 71-91, 94-108, 111-125, 128-152, or 155-157 and a prime editor comprising a Cas9 nickase having a nuclease inactivating mutation in the HNH domain and a reverse transcriptase or (b) the prime editing system of any one of claims 20, 44, 69, 92, 109, 126, 153 or 159-166.

174. The method of claim 173, wherein the RHO gene is in a cell.

175. The method of claim 174, wherein the cell is a mammalian cell.

176. The method of claim 175, wherein the cell is a human cell.

177. The method of any one of claims 173-176, wherein the cell is a primary cell.

178. The method of any one of claims 173-177, wherein the cell is in a subject.

179. The method of claim 178, wherein the subject is a human.

180. The method of any one of claims 173-179, wherein the cell is from a subject having Retinitis pigmentosa.

181. The method of any one of claims 173-180, wherein contacting the RHO gene comprises contacting the cell with (i) the population of viral particles of claim 167 or 168 or (ii) the LNP of any one of claims 169-172.

182. A method for treating Retinitis pigmentosa in a subject in need thereof, the method comprising administering to the subject: (A) the PEgRNA of any one of claims 1-19, 22-43, 46-68, 71-91, 94-108, 111-125, 128-152, or 155-157 and a prime editor comprising a Cas9 nickase having a nuclease inactivating mutation in the HNH domain and a reverse transcriptase, (B) the prime editing system of any one of claims 20, 44, 69, 92, 109, 126, 153 or 159-166, (C) the population of viral particles of claim 167 or 168 or (D) the LNP of any one of claims 169-172.

183. A prime editing guide RNA (PEgRNA) comprising:
a. a spacer comprising at its 3′ end a PEgRNA Spacer sequence selected from any one of Tables 1-7;
b. a gRNA core capable of binding to a Cas9 protein; and
c. an extension arm comprising:
i. an editing template comprising at its 3′ end an RTT sequence selected from the same Table as the PEgRNA Spacer sequence, and
ii. a primer binding site (PBS) comprising at its 5′ end a PBS sequence selected from the same Table as the PEgRNA Spacer sequence.

184. The PEgRNA of claim 183, wherein the spacer of the PEgRNA is from 17 to 22 nucleotides in length.

185. The PEgRNA of claim 184, wherein the spacer of the PEgRNA is 20 nucleotides in length.

186. The PEgRNA of any one of claims 183-185, comprising from 5′ to 3′, the spacer, the gRNA core, the editing template, and the PBS.

187. The PEgRNA of claim 186, wherein the spacer, the gRNA core, the editing template, and the PBS form a contiguous sequence in a single molecule.

188. The PEgRNA of any one of claims 183-187, wherein the gRNA core comprises SEQ ID NO: 1854, 1855, 1856, 1857, 1858, or 1859.

189. A prime editing system comprising:
(a) the prime editing guide RNA (PEgRNA) of any one of claims 183-188, or a nucleic acid encoding the PEgRNA; and optionally
(b) a nick guide RNA (ngRNA), or a nucleic acid encoding the ngRNA,
wherein the ngRNA comprises a spacer comprising at its 3′ end nucleotides 4-20 of any ngRNA Spacer sequence selected from the same Table as the PEgRNA Spacer sequence, and a gRNA core capable of binding to a Cas9 protein.

190. The prime editing system of claim 189, wherein the spacer of the ngRNA is from 17 to 22 nucleotides in length.

191. The prime editing system of claim 189-190, wherein the spacer of the ngRNA comprises at its 3′ end nucleotides 3-20, 2-20, or 1-20 of the ngRNA Spacer sequence selected from the same Table as the PEgRNA Spacer sequence.

192. The prime editing system of any one of claims 189-191, wherein the spacer of the ngRNA comprises at its 3′ end the ngRNA Spacer sequence selected from the same Table as the PEgRNA Spacer sequence.

193. The prime editing system of any one of claims 189-192, wherein the spacer of the ngRNA is 20 nucleotides in length.

194. The prime editing system of any one of claims 189-193, wherein the gRNA core of the ngRNA comprises SEQ ID NO: 1854.

195. The prime editing; system of any one of claims 189-194, further comprising: (c) a prime editor comprising a Cas9 nickase having a nuclease inactivating mutation in the HNH domain, or a nucleic acid encoding the Cas9 nickase, and a reverse transcriptase, or a nucleic acid encoding the reverse transcriptase.

196. The prime editing system of any one of claims 189-195, further comprising: (c) an N-terminal extein comprising an N-terminal fragment of a prime editor fusion protein and an N-intein or a polynucleotide encoding the N-terminal extein; and (d) a C-terminal extein comprising a C-terminal fragment of the prime editor fusion protein and a C-intein, or a polynucleotide encoding the C-terminal extein; wherein the N-intein and the C-intein of the N-terminal and C-terminal exteins are capable of self-excision to join the N-terminal fragment and the C-terminal fragment to form the prime editor fusion protein, and wherein the prime editor fusion protein comprises a Cas9 nickase and a reverse transcriptase (RT) domain.

197. The prime editing system of claim 195 or 196, wherein the Cas9 nickase comprises an amino acid sequence having at least 80%, 85%, 90%, 95%, 96%, 97%, 98%, 99%, or 100% identity to SEQ ID NO: 1867 or SEQ ID NO: 1868.

198. The prime editing system of claim 195 or 196, wherein the reverse transcriptase comprises an amino acid sequence having at least 80%, 85%, 90%, 95%, 96%, 97%, 98%, 99%, or 100% identity to SEQ ID NO: 1864.

199. The prime editing system of claim 197 or 198, wherein the sequence identities are determined by Needleman-Wunsch alignment of two protein sequences with Gap Costs set to Existence: 11 Extension: 1 where percent identity is calculated by dividing the number of identities by the length of the alignment.

200. The prime editing system of any one of claims 189-199, comprising the ngRNA.
